United States Patent Application Publication US 2026/0028677 A1 - sequence listing, part 2

SEQ ID NO: 2222 - protein, 232 aa, Homo sapiens
LSLLYKSSVHGGSIEDMVERCSRQGCTITMAYIDYNMIVAFMLGNYINLHESSTEPNDSLWFSLQKKNDTTEIETLLLNTAPKIIDEQLVCRLSKTDIFIICRDNKIYLDKMITRNLKLRFYGHRQYLECEVFRVEGIKDNLDDIKRIIKAREHRNRLLADIRDYRPYADLVSEIRILLVGPVGSGKSSFFNSVKSIFHGHVTGQAVVGSDITSITERGNPNIQLNAKSNGK

SEQ ID NO: 2223 - protein, 116 aa, Homo sapiens
MEEPTAVEGQVQLPSPHQGSLRKAVAAALALDGESTMGHRKKKRKESRPESIIIYRSDNEKTDEEPGESEGGDQPKEEEGDDFLDYPVDDDMWNLPLDSRYVTLTGTITRGKKKGQ

SEQ ID NO: 2224 - protein, 172 aa, Homo sapiens
MAQRLGEWARGPSDATGLYRAVLLRSAAMYSEIQRERADIGGLMARPEYREWNPELIKPKKLLNPVKASRSHQELHRELLMNHRRGLGVDSKPELQRVLEHRRRNQLIKKKKEELEAKRLQCPFEQELLRRQQRLNQLEKPPEKEEDHAPEFIKVRENLRRIATLTSEEREL

SEQ ID NO: 2225 - protein, 2344 aa, Homo sapiens
MIPWSIFLLHVLLFSLQEYICASSILMGTSKNGFNENRQKRALLAAQFEATSPRYFFHDAINWGESKIKGSCPYECLNGAFCSKTGTCDCQIFQALGTRCQIIPNMGNGRDGICKTWGQYHFETFDGIYYYFPGNCSYIFAKDCGDLEPRYTVWVHNSPKCLGSVYSCYRSISLFFSNQEEIRIYGHEIKKNGISLTLPQTIGQIFIEKLADYILVKTTFGFSLAWDGISGIYLKLSEDHKGKSCGLCGNYNDIQSDDFIILQEDYTEDIAMFANSWSVQTPDDTKCVLTPSDFPNPCSSGMPAFEAIFFKCQILLQFPFLSCHEYIDPYLYIASCVNDLCKTDDDETYCRAATEYARACSHAGYPIQDWRDDFPACTDKCDDSFVHRDCISCCPPTCTFEKQCLGSNLHCLDGCYCPDGLVMDNGTCISLENCPCGFHGLAYSVGSKIEQECTECVCVGGVWNCTEQDCPVQCSVVGDSHFTTFDGRHYSFIGMCQYILVKGTGKDKFTITLQKAPCEQNLGLVCLQSITLILEDDFNKQVTLGRGGQILTSPNQGFNLNGIVEIQTLSSLFILLKTTFGLKILFAIDGERIYIQLTSAWKRRTLGLCGTFNGNIRDDFLSPSGMIEGTPQLHANAWRVSSTCFAPVHVPVVDPCNINQQNIGYAAHCDVIHQELFAPCHIYISPGLYYQLCRHDACKCGSSCLCNALAHYAYLCGQHGVPIDFRTQISFCAVVCQKGMLYHHCSSFCLHSCISLSSPEQCSDDCAEGCNCPEGKFYEDTLNFCVPIFHCRCHYRGSVYQPGELIPTPSGLCQCSNGTVKCDELATPSAVHICPEGKEYFDCRFPDPELPAGGVNCETTCANLAMNFTCTPSSPCISGCVCAPGMAEHRGKCYVPESCPCIWKDWEYLSGEVIATPCYTCVCRRGMFNCTYYPCPAVCTIYGDRHYYSFDGLEYDYISDCQVFLIKSADDSDISVIAQNKKCFDNDIVCSKSVLISVGDTEIYLNDTPYKQKQSGFFLENKSTYQLWKAGYYIVVYFPEKDITILWDRKTTIHIKVGPQWKNKLSGLCGNFDKCTSNDMTTSNNLEVRNARVFGDSWALGQCESPDETIKPCEAHQNKFPYAKKECSILYSDIFASCRNVIDVTSFAKNCHEDTCNCNLGGDCECLCTSIAAYAYKCCQEGISIHWRSSTVCSLDCEYYNEGLGEGPYMLASYGQSGLVLGANMTSRSVFCLPRSSVHTSLFFYFMITPGLFKEKVSSLALVSLESAERPNYFLYVHDNDTLSLELWEANSAFHRRATFFHHQGLWIPGYSAFELYSKKGFFIIFTDSSVKASKYDDSEEFKHSSSFSIEEIQAAVPYRKMCEWRYEPCATPCFKTCSDPEALACKFLPPVEGCLPYCPKNMILDEVTLKCVYPRDCIPVIPTEPTLMPPAKPTVPMFTVWEMITPSDITVFDMLTPTTGLECEPQKFDPVYDCSQYICLNMEWQLYNWSLNCPKDVEMPDCGFRGRPVQVNSDICCPEWECPCRCSMLSELSIITFDGNNAALYSMASYILVRIPGEIIVAHIEKCSMNQNGNSLKKLAPSGRISGLCFKKLNVTTPIHKIIVNRLARKVEVDSIVVPLPFSSQELSIEDSGSMYVITTPAGLIIKWSHLTGIIDIHFGFRFNLSSYTEGLCGICNEDPDDDLRMQNGTIITNMEDIGLFIESWEIEKSFEVTMRRPVRNCTEHDCSQCIDLLNRRIFIPCHDKVSPEDFCEKMWINYTYFWNYECDALSAYVALCNKFDICIQWRTPDYCSLSCPEGKEYQPCVRPCEARTCLNQWFYGHTSCLNLREDCVCKVGTILHRPHSAQCIPEKECACTDSEDQPRTAGEIWNGGIDECTLYKCLENGSIIPIEPDCDEEPTPVCEREAEVVMGIIDKWTCCSKEVCGCDTTLCETSIPTCTNSQKLIVGHSPLSCCPQYKCECDPLKCPSISTPECREDQFMIQVRQEEPCCFSPFCVCESCTKPVPLCHDGEFLTVDLNSTHFCCPQYYCVCEPNLCPMPLLNCAEDMNLVKENVSGQCCPTWHCECNCENLIMPTCEVGEFTAIDHNFQSDCGCIQYLCEKDDVCVFQEVSVLNPGQSMIKYLEEDFCYAIECLEEKDNHTGFHTLNFTLVNCSKKCDVHQVYTPSPSDYGCCGTCKNVSCKFHMENGTSVVYAVGSTWHYNCTTYECVKTDEGAIILNYTMVCPPFNETECKMNEGIVKLYNEGCCKICKREERICQKVIIKSVIRKQDCMSQSPINVASCDGKCPSATIYNINIESHLRFCKCCRENGVRNLSVPLYCSGNGTEIMYTLQEPIDCTCQWN

SEQ ID NO: 2226 - protein, 1453 aa, Homo sapiens
RSMMSSYERSMMSYERSMMSPMAERSMMSAYERSMMSAYERSMMSPMAERSMMSAYERSMMSAYERSMMSPMADRSMMSMGADRSMMSSYSAADRSMMSSYSAADRSMMSSYTADRSMMSMAADSYTDSYTDTYTEAYMVPPLPPEEPPTMPPLPPEEPPMTPPLPPEEPPEGPALPTEQSALTAENTWPTEVPSSPSEESVSQPEPPVSQSEISEPSAVPTDYSVSASDPSVLVSEAAVTVPEPPPEPESSITLTPVESAVVAEEHEVVPERPVTCMVSETPAMSAEPTVLASEPPVMSETAETFDSMRASGHVASEVSTSLLVPAVTTPVLAESILEPPAMAAPESSAMAVLESSAVTVLESSTVTVLESSTVTVLEPSVVTVPEPPVVAEPDYVTIPVPVVSALEPSVPVLEPAVSVLQPSMIVSEPSVSVQESTVTVSEPAVTVSEQTQVIPTEVAIESTPMILESSIMSSHVMKGINLSSGDQNLAPEIGMQEIALHSGEEPHAEEHLKGDFYESEHGINIDLNINNHLIAKEMEHNTVCAAGTSPVGEIGEEKILPTSETKQRTVLDTYPGVSEADAGETLSSTGPFALEPDATGTSKGIEFTTASTLSLVNKYDVDLSLTTQDTEHDMVISTSPSGGSEADIEGPLPAKDIHLDLPSNNNLVSKDTEEPLPVKESDQTLAALLSPKESSGGEKEVPPPPKETLPDSGFSANIEDINEADLVRPLLPKDMERLTSLRAGIEGPLLASDVGRDRSAASPVVSSMPERASESSSEEKDDYEIFVKVKDTHEKSKKNKNRDKGEKEKKRDSSLRSRSKRSKSSEHKSRKRTSESRSRARKRSSKSKSHRSQTRSRSRSRRRRRSSRSRSKSRGRRSVSKEKRKRSPKHRSKSRERKRKRSSSRDNRKTVRARSRTPSRRSRSHTPSRRRRSRSVGRRRSFSISPSRRSRTPSRRSRTPSRRSRTPSRRSRTPSRRSRTPSRRSRTPSRRRRSRSVVRRRSFSISPVRLRRSRTPLRRRFSRSPIRRKRSRSSERGRSPKRLTDLDKAQLLEIAKANAAAMCAKAGVPLPPNLKPAPPPTIEEKVAKKSGGATIEELTEKCKQIAQSKEDDDVIVNKPHVSDEEEEEPPFYHHPFKLSEPKPIFFNLNIAAAKPTPPKSQVTLTKEFPVSSGSQHRKKEADSVYGEWVPVEKNGEENKDDDNVFSSNLPSEPVDISTAMSERALAQKRLSENAFDLEAMSMLNRAQERIDAWAQLNSIPGQFTGSTGVQVLTQEQLANTGAQAWIKKDQFLRAAPVTGGMGAVLMRKMGWREGEGLGKNKEGNKEPILVDFKTDRKGLVAVGERAQKRSGNFSAAMKDLSGKHPVSALMEICNKRRWQPPEFLLVHDSGPDHRKHFLFRVLINGSAYQPSFASPNKKHAKATAATVVLQAMGLVPKDLMANATCFRSASRR

SEQ ID NO: 2227 - protein, 174 aa, Homo sapiens
MGVTPHHVCRPPGNVSQVVFHNHSNWSLEDTGALLSSGQKDYVTVQLQNGEIWELSRCSRNKRENTSSLGYEYTGSKKEFPCVDGYIYDQNTWKSTAVTQWNLVCDRKWLAMLIQPLFMFGVLLGSVTFGYFSDRLGRRVVLWATSSSMFLFGIAAAFAVDYYTFMAARFFLAM

SEQ ID NO: 2228 - protein, 235 aa, Homo sapiens
MEVMNLMEQPIKVTEWQQTYTYDSGIHSGANTCVPSVSSKGIMEEDEACGRQYTLKKTTTYTQGVPPSQGDLEYQMSTTARAKRVREAMCPGVSGEDSSLLLATQVEGQATNLQRLAEPSQLLKSAIVHLINYQDDAELATRALPELTKLLNDEDPVVVTKAAMIVNQLSKKEASRRALMGSPQLVAAVVRTMQNTSDLDTARCTTSILHNLSHHREGLLAIFKSGGIPALVRML

SEQ ID NO: 2229 - protein, 835 aa, Homo sapiens
MWPHSAGARPWASTLTGKDPRVMACWCLDGLPSGLAEPWRELWRWRSRPLHCVPPFSPLARSSRDHRNLRRRGNIDGWRQNLEPSNNVEMFPPSGHQDVSERRLDTQRPQVTMWERDVSSDRQEPGRRGRSWGLEGSQALSQQAEVIVRQLQELRRLEEEVRLLRETSLQQKMRLEAQAMELEALARAEKAGRAEAEGLRAALAGAEVVRKNLEEGSQRELEEVQRLHQEQLSSLTQAHEEALSSLTSKAEGLEKSLSSLETRRAGEAKELAEAQREAELLRKQLSKTQEDLEAQVTLVENLRKYVGEQVPSEVHSQTWELERQKLLETMQHLQEDRDSLHATAELLQVRVQSLTHILALQEEELTRKVQPSDSLEPEFTRKCQSLLNRWREKVFALMVQLKAQELEHSDSVKQLKGQVASLQEKVTSQSQEQAILQRSLQDKAAEVEVERMGAKGLQLELSRAQEARRRWQQQTASAEEQLRLVVNAVSSSQIWLETTMAKVEGAAAQLPSLNNRLSYAVRKVHTIRGLIARKLALAQLRQESCPLPPPVTDVSLELQQLREERNRLDAELQLSARLIQQEVGRAREQGEAERQQLSKVAQQLEQELQQTQESLASLGLQLEVARQGQQESTEEAASLRQELTQQQELYGQALQEKVAEVETRLREQLSDTERRLNEARREHAKAVVSLRQIQRRAAQEKERSQELRRLQEEARKEEGQRLARRLQELERDKNLMLATLQQEGLLSRYKQQRLLTVLPSLLDKKKSVVSSPRPPECSASAPVAAAVPTRESIKGSLSVLLDDLQDLSEAISKEEAVCQGDNLDRCSSSNPQMSS

SEQ ID NO: 2230 - protein, 112 aa, Homo sapiens
MLPPQKKPWESMAKGLVLGALFTSFLLLVYSYAVPPLHAGLASTRTPEAAASCSPPALEPEAVIRANGSAGECQPRRNIVFLKTHKTASSTLLNILFRFGQKHRLKFAFPNG

SEQ ID NO: 2231 - protein, 313 aa, Homo sapiens
MALLCYNRGCGQRFDPETNSDDACTYHPGVPVFHDALKGCTKGRHNSEKPPEPVKPEVKTTEKKELCELKPKFQEHIIQAPKPVEAIKRPSPDEPMTNLELKISASLKQALDKLKLSSGNEENKKEEDNDEIKIGTSCKNGGCSKTYQGLESLEEVCVYHSGVPIFHEGMKYWSCCRRKTSDFNTFLAQEGCTKGKHMWTKKDAGKKVVPCRHDWHQTGGEVTISVYAKNSLPELSRVEANSTLLNVHIVFEGEKEFDQNVKLWGVIDVKRSYVTMTATKIEITMRKAEPMQWASLELPAAKKQEKQKDATTD

SEQ ID NO: 2232 - protein, 130 aa, Homo sapiens
MPLRDKYCQTDHHHHGCCEPVYILEPGDPPLLQQPLQTSKSGIQQIIECFRSGTKQLKHILLKDVDTIFECKLCRSLFRGLPNLITHKKFYCPPSLQMDDNLPDVNDKQSQAINDLLEAIYPSVDKREYI

SEQ ID NO: 2233 - protein, 381 aa, Homo sapiens
MSCLHPRQTWKGAALVHRKAWWMGRSLDGRLQVSHRKGLPHVIYCRLWRWPDLHSHHELRAMELCEFAFNMKKDEVCVNPYHYQRVETPVLPPVLVPRHTEIPAEFPPLDDYSHSIPENTNFPAGIEPQSNIPETPPPGYLSEDGETSDHQMNHSMDAGSPNLSPNPMSPAHNNLDLQPVTYCEPAFWCSISYYELNQRVGETFHASQPSMTVDGFTDPSNSERFCLGLLSNVNRNAAVELTRRHIGRGVRLYYIGGEVFAECLSDSAIFVQSPNCNQRYGWHPATVCKIPPGCNLKIFNNQEFAALLAQSVNQGFEAVYQLTRMCTIRMSFVKGWGAEYRRQTVTSTPCWIELHLNGPLQWLDKVLTQMGSPSIRCSSVS

SEQ ID NO: 2234 - protein, 122 aa, Homo sapiens
MNPREEKVKIITEEFIENDEDADMGRQNKNSKVRRQPRKKQKPTPFSRACWQILPHLSAGVPLLGWEHPVQGKSFQATNCCPQGNGVRKIPPWQPPGACAGGAQDPPPEYDSPERPTERAGC

SEQ ID NO: 2235 - protein, 88 aa, Homo sapiens
MGETEKRIETHRIRCLSKLKMFLLAITCAFVSKTLSGSYMNSMLTQIERQFNIPTSLVGFINGSFEIGNLLLIIFVSYFGTKLHRPIM

SEQ ID NO: 2236 - protein, 1089 aa, Homo sapiens
MKNLLTEKCISSHNFHQKVIKQRMEKKVDSRFYYEQRLLRKVFEEWKEEWWVFQHEWKLCVRADCHYRVWWSTWRQRLGQVRVSRALHASALKHRALSLQVQAWSQWREQLLYVQKEKQKVVSAVKHHQHWQKRRFLKAWLEYLQVRRVKRQQNEMAERFHHVTVLQIYFCDWQQAWERRESLYAHHAQVEKLARKMALRRAFTHWKHYMLLCAEEAAQFEMAEEHHRHSQLYFCFRALKDNVTHAHLQQIRRNLAHQQHGVTLLHRFWNLWRSQIEQKKERELLPLLHAAWDHYRIALLCKCIELWLQYTQKRRYKQLLQARADGHFQQRALPAAFHTWNRLWRWRHQENVLSARATRFHRETLEKQVFSLWRQKMFQHRENRLAERMAILHAERQLLYRSWFMWHQQAAARHQEQEWQTVACAHHRHGRLKKAFCLWRESAQGLRTERTGRVRAAEFHMAQLLRWAWSQWRECLALRGAERQKLMRADLHHQHSVLHRALQAWVTYQGRVRSILREVAARESQHNRQLLRGALRRWKENTMARVDEAKKTFQASTHYRRTICSKVLVQWREAVSVQMYYRQQEDCAIWEAQKVLDRGCLRTWFQRWWDCSRRSAQQRLQLERAVQHHHRQLLLEGLARWKTHHLQCVRKRLLHRQSTQLLAQRLSRTCFRQWRQQLAARRQEQRATVRALWFWAFSLQAKVWATWLAFVLERRRKKARLQWALQAYQGQLLQEGATRLLRFAASMKASRQQLQAQQQVQAAHSLHRAVRRCATLWKQKVLGRGGKPQPLAAIAPSRKVTFEGPLLNRIAAGAGDGTLETKRPQASRPLGALGRLAAEEPHALELNTAHSARKQPRRPHFLLEPAQSQRPQKPQEHGLGMAQPAAPSLTRPFLAEAPTALVPHSPLPGALSSAPGPKQPPTASTGPELLLLPLSSFMPCGAAAPARVSAQRATPRDKPPVPSSLASVPDPHLLLPGDFSATRAGPGLSTAGSLDLEAELEEIQQQLLHYQTTKQNLWSCRRQASSLRRWLELNREEPGPEDQEVEQQVQKELEQVEMQIQLLAEELQAQRQPIGACVARIQALRQALC

SEQ ID NO: 2237 - protein, 271 aa, Homo sapiens
MYRPRARAAPEGRVRGCAVPSTVLLLLAYLAYLALGTGVFWTLEGRAAQDSSRSFQRDKWELLQNFTCLDRPALDSLIRDVVQAYKNGASLLSNTTSMGRWELVGSFFFSVSTITTIGYGNLSPNTMAARLFCIFFALVGIPLNLVVLNRLGHLMQQGVNHWASRLGGTWQDPDKARWLAGSGALLSGLLLFLLLPPLLFSHMEGWSYTEGFYFAFITLSTVGFGDYVIASCLISDTRKPNRDWQTLERTSKSSGGLLKYRFLAGHGGSHL

SEQ ID NO: 2238 - protein, 6907 aa, Homo sapiens
MELYLGACSKPAKVAVTKTVASVLAADTQQCRDGVHKTHFAGVGPAQLLDLPLGVKLPVIPGSNAVFYTTNFGEKLFRPSYGFNLTDPYCRLLENQYKSLHDPHLKAYYKRKDILKRLKKGGYITSNNKVVCTLRELNKYRQYLTSLKLDFERNYIKEQRILAKQLHNIPENNQIPQHCDVAQVQNWLLKEGTESIKDQERLMRHRYLDMISRKLEQLERTAEEQRLFLMDREERRQREHTRRKLTLRRKIEEEWKTKEMLLLTRMAEDVKREERIEEQQHRNREESDRKKQDLLEKKMAYHLQKMQDTGFNGEDIGKNTFKYRGQDGTHASPKNKKKTSEDIMLVYPAGDQNTYKETHGHTANAAHQRQNSSNNFTKKNSASVVYQADVQDNGINQKRDGMVSKNSSIFDDRGGINISGQGSIISAQVSPTRNFSRVSQAFLDPSKEEKETNADWDGRPTKRSSYLCESGPQAHATDPGIFSSPVYTNMQQNLLQNCLQEKVTSEELNIIIQNVMTWVVATVTSILYPAITKYEKRLQNNTYPVSDDSILSSDSSSFCSTCSEDFTYRSYTSATTKTFQAEPCAFVVDTSVRRPTTPIKPPPAHVEKTVVGKTCHIKGQSIISKHKYNKTNLLYSYPKLRSCKSDSHLLASFETGTKKSKDATTETDSLGSSLHCDKTAKAMDEMKNLKNVFVNFKCYLKGETEVILESILREIMSDLTQAIPSLSSVTAEVFVEQCEREKEILLSNAHIPSVASEIVENMLEKLESAVEKKCVEMFSQDLSVDIKPSLAASDELLTSSNGKPLKNSMPHTLDPMCDIAEDMVHAILEKLMTLVSFKQNEFLHLKDTNKLSCQQHKTDPICMFLQRAGKNKSSLESDEASLIVNEEVQNLISNIFSQSSLVAYIEEAINAILGYIQTELNNERIIASEETVVLLQLLEDILFQLHQEPVNESFQKSRQPRISSPSDTKEKYRLTGTRLSNSPRSGRPFPPINVPGMVLYSDDENEEIDNIVKNVLDSTFKDEKVKSQEQIPNHWFTKGNTCFECKRNIKPPTKPGSRSKAAFHDWELKTEPPSTNHEDILKKKLSSNKDISTFSQDQKHQIEKASENIVTSILKEMLKDISSVPFGHLDSKTGSEASVLVSEKPQGLSHQEWIDQMFSVSEISTVAQEITDSVLNILHKASNYISNTTKSSISSSVHQISLHNSDTEHIVKEAPNKYPLKTWFDSEKKMKYLSLFDVDPEKPPWLKSGKSEPKPVDDINDKIIRTIFKRLKSFICPKLHMGFKSSLRSQLSKYTAKIVNIVLCAIQNELELHKENLNLREIDHTKSLTDKGFFANTDKKLESLVTSIDDDILASPLLTCIYDMLLSSENAHQRSISLSSRKPKSATDSVDVQSILPNRQDKKSFHKYLATPCTHHSVNGGNHIKENAKLQVLERIGETLHEMLSKLLGTHLHSQLSCSQQSREMTNKNQKMAAALQSNIQLISKAILDYILAKLCGVDMDTSFASCGLKAISESLDIDNPSFASIIEKMAKSTKIISSIVSRRVQEDNKEETKSKAKPVAPVSSKTPSTKEMHPNKLKAVASDILNMVFAKLEGFANGHLEILGAINDGNKKSNKIGWEYESTNISRDTHEASFLSALYMHAKKVSSAILKVIQTELNVTSSDLKTSVENPPPETQILKYVVKLILDAVSSDMFNEMESEGGGIETYRYRPTYGSLPGGAESDSFLEDDAYTAKKIIDERSPQREEVKTRSLKQWALEKTLNKIEVKLKEPHISPIAPIIRNILNEIFQSTLINQLNVLSLSHSNFNGMPHNVDEPTPQTSVQFMDKMMDPLLSEADITIVTDNIVRTVFHKLYSAAMTERNVRENRYKTITFSANVSSHEHTYKGKSSVTALDENPCTFQSRFSVADKETKVNLAEDIVQAILTNLETFATSKVKSLFYSQVNFTVPVALPIQQDHSTLSKALSAKDSYSDEQFSCCSVDHTKSGKTNLCQLSLSKLNTYALQVARRNLQGIKQELDKERENPFLTHDIGISESIASQIVNALLDIISRKGKCDKNSSDKEIDLDQQKGVIEKLLNETKYRKVLQLQIQDTIEGILCDIYEKTLFQNNLSFATPTLKCSIADKHSEENSEMFMEGANKIIPKLSVPKSDVILISNDIVNIVLHNLSSAATLVINAKNPTSARLPLTFCDTFPKIDCQQPLKGSKTERKTERFSYSRNQKSAYADDNQITVVEKEDTQKSATDSCEENANFITKTIFKRLESFATERIDSLITLAFQSKEKSFVIPELENCKQNDSIFYDSSQVESDVNVLKISATETILSQELTDFTFVGRREKLGSTIHLSQARLKTYADVIASAILKLIKNDLDLEIQKIYPYQNNILFQENIIVSEIVDSMLKMLDDKRSVKEICFNSKENSNFSQLALSNEILLGHKEKERSTKQSLFTKYPLEQNQMILENKRQIIVLEEIFMRNGESKNKEKGELLIAVEELLNKLYQRVREVTGHLPPLNETANFISNSKIKTSDTTQKNSFQSHINSVANDIVESVLGKMYLVVVTSLYENNKSRTEVEISDHNDSLLMKPLRFRETKQAGKISNSPRYAISQAYSYVDSQNISVMENTLLPYLPLQVKKDLIQMVLNKITNFVSLPLKVSPKDNPKPCFKAHLKTRSKITTLPKFTKKTHLGLSAAKAKSKTKLGPGEKTLKDSRSKTAIGLSHIMSAGDAKNLLDTKLPTSELKIYAKDIIINILETIVKEFGKVKQTKALPSDQIIAAGKIVNTVLQELYVTNNCNLAYPMKSSHLRLSQGNIGTGSLPKQQACFYLENVSSQLEHIFPREGIFKKLFDKWQTESNDKENEKCKLLMIAENVLTEISIKAKELEYSLSLLNLPPLENCESRFYNHFKGASTRAEDTKAQINMFGREIVEMLLEKLQLCFLSQIPTPDSEETLSNSKEHITAKSKYGFPNKHSLSSLPIYNTKTKDQISVGSSNQIVQEIVETVLNMLESFVDLQFKHISKYEFSEIVKMPIENLSSIQQKLLNKKMLPKLQPLKMFSDKSESNTINFKENIQNILLRVHSFHSQLLTYAVNIISDMLAVIKNKLDNEISQMEPSSISILKENIVASEIIGTLMDQCTYFNESLIQNLSRESLFQGAENAYTVNQVELATNMKMFTSKLKEGSLGINPSQVSKTGFVFCSDEDMKEKYRVSSDLPTSVRSSVEDTVKNSEPTKRPDSETMPSCSTRNKVQDHRPRESNFGSFDQTMKGNSYLPEGSFLQKLLRKASDSTEAALKQVLSFIEMGKGENLRVFHYENLKPVVEPNQIQTTISPLKICLAAENIVNTVLSSCGFPSQPHTNENREIMKPFFISKQSSLSEVSGGQKDNEKSLLRMQDKKINYIPEEENENLEASREDSSFLQKLKKKEYPKIETVKEVEAFTFADHEMGSNEVHLIARHVTTSVVTYLKNFETTVFSEEKMSVSTWSRKKYESKQFLRNIYDDSSIYQCCEHLTESVLYHLTSSISDGTKKGREKEKAWEIQEATFSKIISIHSQVFESRSISIGELALCISEIIIKILFNNKIIQADIAQKMVAIPTKYTYCPGIVSGGFDDLFQDLLVGVIHVLSKEIEVDYHFESNVRNKSFSMHRNNSVPLCNKINRQASPRDWQFSTQQIGQLFQKNKLSYLACKLNSLVGNLKTSESKEVVNKVFNIVSDLFSPDECLDTGMDSGKIQRTYFYSSNNEQPNSILTNNLQLSSKSVFLLNVVCEKLIRILLEECTSTAFPDKGSVSEETSAEECQLLKMLQSVEDGKSDYRKGGMDCECLQVDYMSDLLENVAEIDQDLLTSDSMLTIISHSLVKSLMDKLSHSIQQAPESLPFANKHLNYRTREIQSSFIKARKSELIELGQSKSSLELRSYDSNSLTVSLNNPSVVSSKIQAPFNKHCAVKSSSVSPFERQRTKEMDKVAIHNKLHQEGIYAGVYSATFLEGIISELFFNLSMSLWGKNKNITVSWLNEMNTLFVNNVVNEFNNAQVTVLRNAEERLCFPPVHTETVSKIVDSVYYDVLQQYELKVACGNNPVYDNASIAEQITNGILLEILDYKLPSCFKEHLIPHSYYPLKPEIILQKLQSNLTEFTSLPRSSSDYSTMLSHSFLEDVIRRLLSQLIPPPITCSSLGKKYLMSSDFNEMSTCIINKVMSAISKHKIWFTIYDNQYLYTGKNLQKMVDSVYCNILQMSDSLVSIQKSIVSRSPIMIDQIASFIIQEIIENHLQPFLSGEVLCHPRTPLDPVSTIVTQVLSEVIESHRPQKQSPLDIHLDSFVREIVARLLSKIFSPKHNTEIELKNMTQRIVNSINRHFNKAKIHILYDDKEQAFFSFNTDIVDELATSVYRNALKQHGLDLAVDKESEDSGIFVENITNLIVAAISDYLLHPLFSGDFSASTYSNSVAENIVQDILSNISKSTEPSQSVPLYNTLLPYTFLEDMIRVLLSKLFSSASSLVLNRDTQKDISRVNFNDIASNLVSDIRMKVSQHEIRFSKEEEETKFIYSEDDIQHLVDSVFANVVQTSGSQESAVQNITSSNDILIDRIAGFIIKHICQKHLQPFVSGKSLSSSDTYFDDERRQLFYTSVYSSTFLEDVISGVLRKIFHRVVGIVQTKSIRDSEDELFEKAEELIHLITGEFSKAQVSIIDNTEERLCLPPVERDVVKTIVDMVYSKVLQEYEMEVVPNKDFLNDTKTLAARITNIILAEIFDFQIHPDLIANLPFKSHSKLSANVLIQRVQYDISKSRFQRQASTMYTTMLSHSHLEKIVTQLTSQISPLNTSAEQSDTTKSDLSNTVIKLINEIMSIISKHEICIIKYGNKKQSMISAKDIQSMVDSIYADLSHSNIYQSITKDKKSISDIPVSKIASFIIKEIFNHHIQSFLSEDKTLLLAAVDQTYKLKAIDPKQRELSFIVNSSVFLEEVISELLCKILYAFSHNMLVTENPDRVKLKLTRIVTTLVNSIVLEFTTSEILVADNFDKNLCFSERYKEMVQKIVNSVYGKVLDQYKSLIQIHRVIQSDTICFGRKIYYLLLEEIYDYQVQSLVSGELESSSYSYPQADNIIRNVLNIITKDSHALPPYITVLPHSLLEDMVYRLLGHVFPSTHTENELKEKKFPPDDEFVEAASKLTDEIIKEISEHEIRLSMAEDNAESMQLEPIENLVDSICNNILKTSEFQAEVQKDADKKGCSFLSKLAGFIMKEIMYHHLQPFLHGEESSFSDLSDYDHVSELAKSGKEKTQPSLYSATFLEDIIIDLVHKFCSLLIITEDSKKNEMAELDIMGLALKLANSLIREFKKSDIKVLPNAEKMFSFPPIDKETVDKISNFVYEQFIEKCTSHDIQKGDESNIAIGMIAALTQKAISAFRIQPLFSGDWSSTFFSFLNPDNITQRVQHLPQNTFTQISRCAKENQLSLPDQSYKDTSSTPDCKNMMSTLEINRGTMNRKKSFKTKDTSVKKGDIQNPVLSSINAIMKSGMINLTSGLATGVTNKKEVDENKVGICTQKHSENVSKVTSTTTVKSKDTQEPNLSETFNNNEIEKKRNLIPTDKKGKDDEIYTHFSLIIDDTEYEKEVLGSDSEIGYKKKIDNARESSFKKDDKLFQLSSLKSKRNLGTTTDTLEIRIRTSSNEGRRDSPTQTCRDEEHHSDYEHVQNVIENIFEDVLELSSSPEPAYYSKLSYDQSPPGDNVLNVIQEISRDSAQSVTTKKVSSSTNKNISAKEKEEEEREKEKVREEIKSEPSKPDDPQNQRESKPGIFPAKFLEDVITEMVKQLIFSSIPETQIQDRCQNVSDKQNQAKLYDTAMKLINSLLKEFSDAQIKVFRPDKGNQFPGGKVSSVPKVPPRYKEPTTDEAPSSIKIKSADKMPPMHKMMRKPSSDKIPSIDKTLVNKVVHSSVCNILNDYGSQDSIWKNINSNGENLARRLTSAVINEIFQRQVNLIFCDEVSVSACLPLESKDVVKKVQKLAQTASKECQTSSPYTIILPHKFLENVISALFSKIFSTISSTKTKEPEDNLSTELNFLQMKLVSAVATEISQDKYMTIQYVETLQSDDDEIIQLVVQSVYNNLLPQFGSQEIIQNCVTSGCKILSENIVDLVLREVASNQLQSYFCGELTPHQCVEVENIVEKILKDVFQTTDVPLPKPSHADKLSYNIIEEIAVKFLSKLLSIFPKVHKERTKSLETDMQKITSKVLNSVQEFISKSKIKLVPPTKESPTVPVADNATIENIVNSIYTSVLKHSGSYTSVFKDLMGKSNVLSDTIGFLMVNAISNSEFQPQVEEEVSNSELVLEAVKIMEKVIKIIDELKSKEKSSSRKGLTLDAKLLEEVLALFLAKLIRLPSSSSKDEKNLSKTELNKIASQLSKLVTAEISRSSISLIASDPEEHCLNPENTERIYQVVDSVYSNILQQSGTNKEFYYDIKDTNTAFPKKVASLIIDGVSSFPLDTINSTISNADLSGELDVNRIVQKAQEHAFNVIPELEQEKLDQNLSEEESPIKIVPHVGKKPVKIDPKIISEHLAVISIKTQPLEKLKQECLKRTGHSIAELRRASISGRNYSLGSPDLEKRKTERRTSLDKTGRLDVKPLEAVARNSFQNIRKPDITKVELLKDVQSKNDLIVRLVAHDIDQVYLENYIKEERDSDEDEVVLTQTFAKEEGIKVFEDQVKEVKKPIQSKLSPKSTLSTSSLKKFLSLSKCCQTTASANIESTEAISNQVIESKETHVKRAVAELDMATPKTMPETASSSWEEKPQCKKEEKNLVTEPTHYFIHRIMSSSSYNQEDLISSTGEAEDCHSDPSAKILEESSQEQKPEHGNSVKFITIFERSKDVLGSANPSKEVISETPKPDVSKQGSKMLTKMSSTLSKVFSQCNTNISRSSSPAHQDEH

SEQ ID NO: 2239 - protein, 771 aa, Homo sapiens
MGRAGTGTGGEAVAAVVAGPLLLLLLARPPPASAGYSGKSEVGLVSEHFSQAPQRLSFYSWYGSARLFRFRVPPDAVLLRWLLQVSRESGAACTDAEITVHFRSGAPPVINPLGTSFPDDTAVQPSFQVGVPLSTTPRSNASVNVSHPAPGDWFVAAHLPPSSQKIELKGLAPTCAYVFQPELLVTRVVEISIMEPDVPLPQTLLSHPSYLKVFVPDYTRELLLELRDCVSNGSLGCPVRLTVGPVTLPSNFQKVLTCTGAPWPCRLLLPSPPWDRWLQVTAESLVGPLGTVAFSAVAALTACRPRSVTIQPLLQSSQNQSFNASSGLLSPSPDHQDLGRSGRVDRSPFCLTNYPVTREDMDVVSVHFQPLDRVSVRVCSDTPSVMRLRLNTGMDSGGSLTISLRANKTEMRNETVVVACVNAASPFLGFNTSLNCTTAFFQGYPLSLSAWSRRANLIIPYPETDNWYLSLQLMCPENAEDCEQAVVHVETTLYLVPCLNDCGPYGQCLLLRRHSYLYASCSCKAGWRGWSCTDNSTAQTVAQQRAATLLLTLSNLMFLAPIAVSVRRFFLVEASVYAYTMFFSTFYHACDQPGEAVLCILSYDTLQYCDFLGSGAAIWVTILCMARLKTVLKYVLFLLGTLVIAMSLQLDRRGMWNMLGPCLFAFVIMASMWAYRCGHRRQCYPTSWQRWAFYLLPGVSMASVGIAIYTSMMTSDNYYYTHSIWHILLAGSAALLLPPPDQPAEPWACSQKFPCHYQICKNDREELYAVT

SEQ ID NO: 2240 - protein, 199 aa, Homo sapiens
MLPPQKKPWESMAKGLVLGALFTSFLLLVYSYAVPPLHAGLASTTPEAAASCSPPALEPEAVIRANGSAGECQPRRNIVFLKTHKTASSTLLNILFRFGQKHRLKFAFPNGRNDFDYPTFFARSLVQDYRPGACFNIICNHMRFHYDEVRGLVPTNAIFITVLRDPARLFESSFHYFGPVVPLTWKLSAGDKLTEFLQD

SEQ ID NO: 2241 - protein, 977 aa, Homo sapiens
MPARRLLLLLTLLLPGLGIFGSTSTVTLPETLLFVSTLDGSLHAVSKRTGSIKWTLKEDPVLQVPTHVEEPAFLPDPNDGSLYTLGSKNNEGLTKLPFTIPELVQASPCRSSDGILYMGKKQDIWYVIDLLTGEKQQTLSSAFADSLCPSTSLLYLGRTEYTITMYDTKTRELRWNATYFDYAASLPEDDVDYKMSHFVSNGDGLVVTVDSESGDVLWIQNYASPVVAFYVWQREGLRKVMHINVAVETLRYLTFMSGEVGRITKWKYPFPKETEAKSKLTPTLYVGKYSTSLYASPSMVHEGVAVVPRGSTLPLLEGPQTDGVTIGDKGECVITPSTDVKFDPGLKSKNKLNYLRNYWLLIGHHETPLSASTKMLERFPNNLPKHRENVIPADSEKKSFEEVINLVDQTSENAPTTVSRDVEEKPAHAPARPEAPVDSMLKDMATIILSTFLLIGWVAFIITYPLSMHQQQQLQHQQFQKELEKIQLLQQQQQQLPFHPPGDTAQDGELLDTSGPYSESSGTSSPSTSPRASNHSLCSGSSASKAGSSPSLEQDDGDEETSVVIVGKISFCPKDVLGHGAEGTIVYRGMFDNRDVAVKRILPECFSFADREVQLLRESDEHPNVIRYFCTEKDRQFQYIAIELCAATLQEYVEQKDFAHLGLEPITLLQQTTSGLAHLHSLNIVHRDLKPHNILISMPNAHGKIKAMISDFGLCKKLAVGRHSFSRRSGVPGTEGWIAPEMLSEDCKENPTYTVDIFSAGCVFYYVISEGSHPFGKSLQRQANILLGACSLDCLHPEKHEDVIARELIEKMIAMDPQKRPSAKHVLKHPFFWSLEKQLQFFQDVSDRIEKESLDGPIVKQLERGGRAVVKMDWRENITVPLQTDLRKFRTYKGGSVRDLLRAMRNKKHHYRELPAEVRETLGSLPDDFVCYFTSRFPHLLAHTYRAMELCSHERLFQPYYFHEPPEPQPPVTPDAL

SEQ ID NO: 2242 - protein, 962 aa, Homo sapiens [sequence omitted]

SEQ ID NO: 2243 - protein, 968 aa, Homo sapiens [sequence omitted]

SEQ ID NO: 2244 - protein, 162 aa, Homo sapiens
MAEQVLPQALYLSNMRKAVKIRERTPEDIFKPTNGIIHHFKTMHRYTLEMFRTCQFCPQFREIIHKALIDRNIQATLESQKKLNWCREVRKLVALKTNGDGNCLMHATSQYMWGVQDTDLVLRKALFSTLKETDTRNFKFRWQLESLKSQEFVETGLCYDTR

SEQ ID NO: 2245 - protein, 149 aa, Homo sapiens
PGRGSPKDRLPPAPRKRALVSVGVAERAVHETPTLTHETFKALKPGLSAYADDVEKVKKVFKASPFLVGDDCVSIMNGTDEGVSAWITINFLTGSLKTPGGSSVGMLDLGGGSTQIAFLPRVEGTLQASPPGYLTALRMFNRTYKLYSY

SEQ ID NO: 2246 - protein, 1302 aa, Homo sapiens
MPGGACVLVIALMFLAWGEAQECSPGGHQFLRSPYRSVRFDSWHLQQSAVQDLICDHSLSPGWYRFLILDRPAEMPTKCVEMNHCGTQAPIWLSLRDSETLPSPGEIKQLTACATWQFLFSTTKDCCLFQIPVSVRNCGNFSVYLLQPTQGCMGYCAEAISDARLHPCGSDETETGGDCVRQLAASLPPPPAGRPEVLVELIESRLFCRCSFDVPATKNSVGFHIAWSRLSSQEVKEELTQETTVQAFSLLELDGINLRLGDRIFCSASVFFLENPHVQSVAIESQEFFAGFKLQPELSTISEDGKEYYLRIESTVPIICSEFSELDQECKISLKLKTIGQGREHLGLNLALSSCHVDLLQTSSCANGTCSHTFVYYTAVTDFSRDGDRVSNIVVQPIVNEDFLWNNYIPDSIQIKVKDVPTAYCYTFTDPHIITFDGRVYDNFKTGTFVLYKSMSRDFEVHVRQWDCRSLHYPVSCNCGFVAQEGGDIVTFDMCNGQLRESQPYLFIKSQDVTRNIKISESYLGRKVTIWFSSGAFIRADLGEWGMSLTIRAPSVDYRNTLGLCGTFDENPENDFHDKNGMQIDQNFNNYVAFINEWRILPGKSMSDTLPVSMTSPGKPSYCSCSLDTAAYPSSEDLDSVSRSEIALGCKDLNHVSLSSLIPELDVTSEYINSDTLVREINKHTSPEEYNLNLFLQEKKHINLTKLGLNVQKHPGNEKEDSLQYLANKKYTQGRGSHSQEMRYNRQNRWKRQNFHEFPPLFAFPSLSQTDLEELTYFFPEDHAEDVQQEFFPSWPTPSGLTEYSTLTLCQETLANSSIGRLCLAFLGKRLDSVIEMCVKDVLLKDDLSWAEAGVALLENECEKRIVEEGKYNTEEYGTSIEDILSVLKCPNLCSGNGQCMEWGCACSPSFSSYDCSDSYDKAPEITELGNAGFCDVQKYNCMMVRVFGKGFKELPSIKCEVTKLQYNSSEWMPGEPIYTQTVFHNSRAVDCQLPTDVQQFDTMDLVGGKPTGKWQLKVSNDGYKFSNPKITVIYDGACQVCGLYKNDSCTIKENVCIIDGLCYVEGDKNPTSPCLICRPKISRFTWSFLENNQPPVIQALQDKLQTFYGENFEYQFVAFDPEGSDIHFTLDSGPEGASVSSAGLFMWKTDLLTTQQITVRLNDDCDAETRVTIEVTVKSCDCLNGGSCVSDRNFSPGSGVYLCVCLPGFHGSLCEVDISGCQSNPCGLGSYISGFHSYSCDCPPELKGKNCQEDVDECDSKPCFEGVACLNTFGSYHCGSCPEGFYGDGKICHGKSFYFLL

SEQ ID NO: 2247 - protein, 258 aa, Homo sapiens
MGSRAELCTLLGGFSFLLLLIPGEGAKGGSLRESQGVCSKQTLVVPLHYNESYSQPVYKPYLTLCAGRRICSTYRTMYRVMWREVRREVQQTHAVCCQGWKKRHPGALTCEAICAKPCLNGGVCVRPDQCECAPGWGGKHCHVGSFTCGCPHDLVLGVDGRTCMEGSPEPPTSASILSVAVREAEKDERALKQEIHELRGRLERLEQWAGQAGAWVRAVLPVPPEELQPEQVAELWGRGDRIESLSDQVLLLEERLGA

SEQ ID NO: 2248 - protein, 352 aa, Homo sapiens
MVKSKWGLALAAVVTVLSSLLMSVGLCTLFGLTPTLNGGEIFPYLVVVIGLENVLVLTKSVVSTPVDLEVKLRIAQGLSSESWSIMKNMATELGIILIGYFTLVPAIQEFCLFAVVGLVSDFFLQMLFFTTVLSIDIRRMELADLNKRLPPEACLPSAKPVGQPTRYERQLAVRPSTPHTITLQPSSFRNLRLPKRLRVVYFLAPTGAHTCWALGSRTQGPRWGAGPWRRHAVQGGGAGPGHRHRLGAAAALPLPRAMPAQLRAAGWWARAAEARGAALRRLRLCATRDGDRAACAARPPHGHRVPGQRRHAAGELLPGRPRLRVGRADRGLPNAHSAPRQAAPGQWRGQRA

SEQ ID NO: 2249 - protein, 601 aa, Homo sapiens
LFDTDTWSLQIRKTGAQTATDFPHAIRIWYKTKPEGRSVTWTSDQSGRPCVYTVGSPINNRALFPCQEPPVAMSTWQATVRAAASFVVLMSGENSAKPTQLWEECSSWYYYVTMPMPASTFTIAVGCWTEMKMETWSSNDLATERPFSPSEANFRHVGVCSHMEYPCRFQNASATTQEIIPHRVFAPVCLTGACQETLLRLIPPCLSAAHSVLGAHPFSRLDVLIVPANFPSLGMASPHIMFLSQSILTGGNHLCGTRLCHEIAHAWFGLAIGARDWTEEWLSEGFATHLEDVFWATAQQLAPYEAREQQELRACLRWRRLQDEMQCSPEEMQVLRPSKDKTGHTSDSGASVIKHGLNPEKIFMQVHYLKGYFLLRFLAKRLGDETYFSFLRKFVHTFHGQLILSQDFLQMLLENIPEEKRLELSVENIYQDWLESSGIPKPLQRERRAGAECGLARQVRAEVTKWIGVNRRPRKRKRREKEEVFEKLLPDQLVLLLEHLLEQKTLSPRTLQSLQRTYHLQDQDAEVRHRWCELIVKHKFTKAYKSVERFLQEDQAMGVYLYGELMVSEDARQQQLARRCFERTKEQMDRSSAQVVAEMLF

SEQ ID NO: 2250 - protein, 433 aa, Homo sapiens
MGCDRNCGLIAGAVIGAVLAVFGGILMPVGDLLIQKTIKKQVVLEEGTIAFKNWVKTGTEVYRQFWIFDVQNPQEVMMNSSNIQVKQRGPYTYRVRFLAKENVTQDAEDNTVSFLQPNGAIFEPSLSVGTEADNFTVLNLAVAAASHIYQNQFVQMILNSLINKSKSSMFQVRTLRELLWGYRDPFLSLVPYPVTTTVGLFYPYNNTADGVYKVFNGKDNISKVAIIDTYKGKRSIYAVFESDVNLKGIPVYRFVLPSKAFASPVENPDNYCFCTEKIISKNCTSYGVLDISKCKEGRPVYISLPHFLYASPDVSEPIDGLNPNEEEHRTYLDIEPITGFTLQFAKRLQVNLLVKPSEKIQVLKNLKRNYIVPILWLNETGTIGDEKANMFRSQVTGKINLLGLIEMILLSVGVVMFVAFMISYCACRSKTIK

SEQ ID NO: 2251 - protein, 437 aa, Homo sapiens
MKKGIRYETSRKTSYIFQQPQHGPWQTRMRKISNHGSLRVAKVAYPLGLCVGVFIYVAYIKWHRATATQAFFSITRAAPGARWGQQAHSPLGTAADGHEVFYGIMFDAGSTGTRVHVFQFTRPPRETPTLTHETFKALKPGLSAYADDVEKSAQGIRELLDVAKQDIPFDFWKATPLVLKATAGLRLLPGEKAQKLLQKVKKVFKASPFLVGDDCVSIMNGTDEGVSAWITINFLTGSLKTPGGSSVGMLDLGGGSTQIAFLPRVEGTLQASPPGYLTALRMFNRTYKLYSYSYLGLGLMSARLAILGGVEGQPAASLHELCAARVSEVLQNRVHRTEEVKHVDFYAFSYYYDLAAGVGLIDAEKGGSLVVGDFEIAAKYGGSHLEREGTCLIPSVSDPGDTAAEQPLLMHGPHLRQPATPGVRLSQEQSAEAHSEN

SEQ ID NO: 2252 - protein, 243 aa, Homo sapiens
RRANLIIPYPETDNWYLSLQLMCPENAEDCEQAVVHVETTLYLVPCLNDCGPYGQCLLLRRHSYLYASCSCKAGWRGWSCTDNSTAQTVAQQRAATLLLTLSNLMFLAPIAVSVRRFFLVEASVYAYTMFFSTFYHACDQPGEAVLCILSYDTLQYCDFLGSGAAIWVTILCMARLKTVLKYVLFLLGTLVIAMSLQLDRRGMWNMLGPCLFAFVIMASMWVRSRAGWHCCPGARRREPGPLL

SEQ ID NO: 2253 - protein, 129 aa, Homo sapiens
MEERGDSEPTPGCSGLGPGGVRGFGDGGGAPSWAPEDAWMGTHPKYLEMMELDIGDATQVYVAFLVYLDLMESKSWHEVNCVGLPELQLICLVGTEIEGEGLQTVVPTPITASLSHNRIFLLEDDIHVS

SEQ ID NO: 2254 - protein, 3052 aa, Homo sapiens
MAFSIDRALNVALGNPSSTAQHVFKVSLVSGMPFYGYHEKERHFMKIYLYNPTMVKRICELLQSGAIMNKFYQPHEAHIPYLLQLFIDYNLYGMNLINLAAVKFRKARRKSNTLHATGSCKNHLSGNSLADTLFRWEQDEIPSSLILEGVEPQSTCELEVDAVAADILNRLDIEAQIGGNPGLQAIWEDEKQRRRNRNETSQMSQPESQDHRFVPATESEKKFQKRLQEILKQNDFSVTLSGSVDYSDGSQEFSAELTLHSEVLSPEMLQCTPANMVEVHKDKESSKGHTRHKVEEALINEEAILNLMENSQTFQPLTQRLSESPVFMDSSPDEALVHLLAGLESDGYRGERNRMPSPCRSFGNNKYPQNSDDEENEPQIEKEEMELSLVMSQRWDSNIEEHCAKKRSLCRNTHRSSTEDDDSSSGEEMEWSDNSLLLASLSIPQLDGTADENSDNPLNNENSRTHSSVIATSKLSVKPSIFHKDAATLEPSSSAKITFQCKHTSALSSHVLNKEDLIEDLSQTNKNTEKGLDNSVTSFTNESTYSMKYPGSLSSTVHSENSHKENSKKEILPVSSCESSIFDYEEDIPSVTRQVPSRKYTNIRKIEKDSPFIHMHRHPNENTLGKNSFNFSDLNHSKNKVSSEGNEKGNSTALSSLFPSSFTENCELLSCSGENRTMVHSLNSTADESGLNKLKIRYEEFQEHKTEKPSLSQQAAHYMFFPSVVLSNCLTRPQKLSPVTYKLQPGNKPSRLKLNKRKLAGHQETSTKSSETGSTKDNFIQNNPCNSNPEKDNALASDLTKTTRGAFENKTPTDGFIDCHFGDGTLETEQSFGLYGNKYTLRAKRKVNYETEDSESSFVTHNSKISLPHPMEIGESLDGTLKSRKRRKMSKKLPPVIIKYIIINRFRGRKNMLVKLGKIDSKEKQVILTEEKMELYKKLAPLKDFWPKVPDSPATKYPIYPLTPKKSHRRKSKHKSAKKKTGKQQRTNNENIKRTLSFRKKRSHAILSPPSPSYNAETEDCDLNYSDVMSKLGFLSERSTSPINSSPPRCWSPTDPRAEEIMAAAEKEAMLFKGPNVYKKTVNSRIGKTSRARAQIKKSKAKLANPSIVTKKRNKRNQTNKLVDDGKKKPRAKQKTNEKGTSRKHTTLKDEKIKSQSGAEVKFVLKHQNVSEFASSSGGSQLLFKQKDMPLMGSAVDHPLSASLPTGINAQQKLSGCFSSFLESKKSVDLQTFPSSRDDLHPSVVCNSIGPGVSKINVQRPHNQSAMFTLKESTLIQKNIFDLSNHLSQVAQNTQISSGMSSKIEDNANNIQRNYLSSIGKLSEYRNSLESKLDQAYTPNFLHCKDSQQQIVCIAEQSKHSETCSPGNTASEESQMPNNCFVTSLRSPIKQIAWEQKQRGFILDMSNFKPERVKPRSLSEAISQTKALSQCKNRNVSTPSAFGEGQSGLAVLKELLQKRQQKAQNANTTQDPLSNKHQPNKNISGSLEHNKANKRTRSVTSPRKPRTPRSTKQKEKIPKLLKVDSLNLQNSSQLDNSVSDDSPIFFSDPGFESCYSLEDSLSPEHNYNFDINTIGQTGFCSFYSGSQFVPADQNLPQKFLSDAVQDLFPGQAIEKNEFLSHDNQKCDEDKHHTTDSASWIRSGTLSPEIFEKSTIDSNENRRHNQWKNSFHPLTTRSNSIMDSFCVQQAEDCLSEKSRLNRSSVSKEVFLSLPQPNNSDWIQGHTRKEMGQSLDSANTSFTAILSSPDGELVDVACEDLELYVSRNNDMLTPTPDSSPRSTSSPSQSKNGSFTPRTANILKPLMSPPSREEIMATLLDHDLSETIYQEPFCSNPSDVPEKPREIGGRLLMVETRLANDLAEFEGDFSLEGLRLWKTAFSAMTQNPRPGSPLRSGQGVVNKGSSNSPKMVEDKKIVIMPCKCAPSRQLVQVWLQAKEEYERSKKLPKTKPTGVVKSAENFSSSVNPDDKPVVPPKMDVSPCILPTTAHTKEDVDNSQIALQAPTTGCSQTASESQMLPPVASASDPEKDEDDDDNYYISYSSPDSPVIPPWQQPISPDSKALNGDDRPSSPVEELPSLAFENFLKPIKDGIQKSPCSEPQEPLVISPINTRARTGKCESLCFHSTPIIQRKLLERLPEAPGLSPLSTEPKTQKLSNKKGSNTDTLRRVLLTQAKNQFAAVNTPQKETSQIDGPSLNNTYGFKVSIQNLQEAKALHEIQNLTLISVELHARTRRDLEPDPEFDPICALFYCISSDTPLPDTEKTELTGVIVIDKDKTVFSQDIRYQTPLLIRSGITGLEVTYAADEKALFHEIANIIKRYDPDILLGYEIQMHSWGYLLQRAAALSIDLCRMISRVPDDKIENRFAAERDEYGSYTMSEINIVGRITLNLWRIMRNEVALTNYTFENVSFHVLHQRFPLFTFRVLSDWFDNKTDLYRWKMVDHYVSRVRGNLQMLEQLDLIGKTSEMARLFGIQFLHVLTRGSQYRVESMMLRIAKPMNYIPVTPSVQQRSQMRAPQCVPLIMEPESRFYSNSVLVLDFQSLYPSIVIAYNYCFSTCLGHVENLGKYDEFKFGCTSLRVPPDLLYQVRHDITVSPNGVAFVKPSVRKGVLPRMLEEILKTRFMVKQSMKAYKQDRALSRMLDARQLGLKLIANVTFGYTSANFSGRMPCIEVGDSIVHKARETLERAIKLVNDTKKWGARVVYGDTDSMFVLLKGATKEQSFKIGQEIAEAVTATNPKPVKLKFEKVYLPCVLQTKKRYVGYMYETLDQKDPVFDAKGIETVRRDSCPAVSKILERSLKLLFETRDISLIKQYVQRQCMKLLEGKASIQDFIFAKEYRGSFSYKPGACVPALELTRKMLTYDRRSEPQVGERVPYVIIYGTPGVPLIQLVRRPVEVLQDPTLRLNATYYITKQILPPLARIFSLIGIDVFSWYHELPRIHKATSSSRSEPEGRKGTISQYFTTLHCPVCDDLTQHGICSKCRSQPQHVAVILNQEIRELERQQEQLVKICKNCTGCFDRHIPCVSLNCPVLFKLSRVNRELSKAPYLRQLLDQF

SEQ ID NO: 2255 - protein, 97 aa, Homo sapiens
MNRLYLTPDGFFFRVHMLALDSSSCNKPCPEFKPGSRYIVMGHIYHKRRQLPTALLQVLRGRLRPGDGLLRSSSSYVKRFNRKREGQIQGAIHTQCI

SEQ ID NO: 2256 - protein, 417 aa, Homo sapiens
MARAMAAAWPLLLVALLVLSWPPPGTGDVVVQAPTQVPGFLGDSVTLPCYLQVPNMEVTHVSQLTWARHGESGSMAVFHQTQGPSYSESKRLEFVAARLGAELRNASLRMFGLRVEDEGNYTCLFVTFPQGSRSVDIWLRVLAKPQNTAEVQKVQLTGEPVPMARCVSTGGRPPAQITWHSDLGGMPNTSQVPGFLSGTVTVTSLWILVPSSQVDGKNVTCKVEHESFEKPQLLTVNLTVYYPPEVSISGYDNNWYLGQNEATLTCDARSNPEPTGYNWSTTMGPLPPFAVAQGAQLLIRPVDKPINTTLICNVTNALGARQAELTVQVKEGPPSEHSGMSRNAIIFLVLGILVFLILLGIGIYFYWSKCSREVLWHCHLCPSSTEHASASANGHVSYSAVSRENSSSQDPQTEGTR

SEQ ID NO: 2257 - protein, 508 aa, Homo sapiens
VVSEEFRNQIVRELVTLPANRWREQLDYYARCSQAPGCGELLFDTDTWSLQIRKTGAQTATDFPHAIRIWYKTKPEGRSVTWTSDQSGRPCVYTVGSPINNRALFPCQEPPVAMSTWQATVRAAASFVVLMSGENSAKPTQLWEECSSWYYYVTMPMPASTFTIAVGCWTEMKMETWSSNDLATERPFSPSEANFRHVGVCSHMEYPCRFQNASATTQEIIPHRVFAPVCLTGACQETLLRLIPPCLSAAHSVLGAHPFSRLDVLIVPANFPSLGMARPSKDKTGHTSDSGASVIKHGLNPEKIFMQVHYLKGYFLLRFLAKRLGDETYFSFLRKFVHTFHGQLILSQDFLQMLLENIPEEKRLELSVENIYQDWLESSGIPKPLQRERRAGAECGLARQVRAEVTKWIGVNRRPRKRKRREKEEVFEKLLPDQLVLLLEHLLEQKTLSPRTLQSLQRTYHLQDQDAEVRHRWCELIVKHKFTKAYKSVERFLQEDQVGVIFQQMGIL

SEQ ID NO: 2258 - protein, 477 aa, Homo sapiens
MAHNPNMTHLKINLPVTALPPLWVRCDSSDPEGTCWLGAELITTNNSITGIVLYVVSCKADKNYSVNLENLKNLHKKRHHLSTVTSKGFAQYELFKSSALDDTITASQTAIALDISWSPVDEILQIPPLSSTATLNIKVESGEPRGPLNHLYRELKFLLVLADGLRTGVTEWLEPLEAKSAVELVQEFLNDLNKLDGFGDSTKKDTEVETLKHDTAAVDRSVKRLFKVRSDLDFAEQLWCKMSSSVISYQDLVKCFTLIIQSLQRGDIQPWLHSGSNSLLSKLIHQSYHGTMDTVSLSGTIPVQMLLEIGLDKLKKDYISFFIGQELASLNHLEYFIAPSVDIQEQVYRVQKLHHILEILVSCMPFIKSQHELLFSLTQICIKYYKQNPLDEQHIFQLPVRPTAVKNLYQSEKPQKWRVEIYSGQKKIKTVWQLSDSSPIDHLNFHKPDFSELTLNGSLEERIFFTNMVTCSQVHFK

SEQ ID NO: 2259 - protein, 255 aa, Homo sapiens
MALLWGLLVLSWSCLQGPCSVFSPVSAMEPLGRQLTSGPNQEQVSPLTLLKLGNQEPGGQTALKSPPGVCSRDPTPEQTHRLARAMMAFTADLFSLVAQTSTCPNLILSPLSVALALSHLALGAQNHTLQRLQQVLHAGSGPCLPHLLSRLCQDLGPGAFRLAARMYLQKGFPIKEDFLEQSEQLFGAKPVSLTGKQEDDLANINQWVKEATEGKIQEFLSGLPEDTVLLLLNAIHFQGFWRNKFDPSLTQRDSF

SEQ ID NO: 2260 - protein, 887 aa, Homo sapiens
SVGASGQRPVFCPVHKQEQLKLFCETCDRLTCRDCQLLEHKEHRYQFLEEAFQNQKGAIENLLAKLLEKKNYVHFAATQVQNRIKEVNETNKRVEQEIKVAIFTLINEINKKGKSLLQQLENVTKERQMKLLQQQNDITGLSRQVKHVMNFTNWAIASGSSTALLYSKRLITFQLRHILKARCDPVPAANGAIRFHCDPTFWAKNVVNLGNLVIESKPAPGYTPNVVVGQVPPGTNHISKTPGQINLAQLRLQHMQQQVYAQKHQQLQQMRMQQPPAPVPTTTTTTQQHPRQAAPQMLQQQPPRLISVQTMQRGNMNCGAFQAHQMRLAQNAARIPGIPRHSGPQYSMMQPHLQRQHSNPGHAGPFPVVSVHNTTINPTSPTTATMANANRGPTSPSVTAIELIPSVTNPENLPSLPDIPPIQANVVPMMHSWYEFGAREKTQDQNVLEDAGSSSLDNLLSRYISGSHLPPQPTSTMNPSPGPSALSPGSSGLSNSHTPVRPPSTSSTGSRGSCGSSGRTAEKTSLSFKSDQVKVKQEPGTEDEICSFSGGVKQEKTEDGRRSACMLSSPESSLTPPLSTNLHLESELDALASLENHVKIEPADMNESCKQSGLSSLVNGKSPIRSLMHRSARIGGDGNNKDDDPNEDWCAVCQNGGDLLCCEKCPKVFHLTCHVPTLLSFPSGDWICTFCRDIGKPEVEYDCDNLQHSKKGKTAQGLSPVDQRKCERLLLYLYCHELSIEFQEPVPASIPNYYKIIKKPMDLSTVKKKLQKKHSQHYQIPDDFVADVRLIFKNCERFNEMMKVVQVYADTQEINLKADSEVAQAGKAVALYFEDKLTEIYSDRTFAPLPEFEQEEDDGEVTEDSDEDFIQPRRKRLKSDERPVHIK

SEQ ID NO: 2261 - protein, 396 aa, Homo sapiens
MPPKRNEKYKLPIPFPEGKVLDDMEGNQWVLGKKIGSGGFGLIYLAFPTNKPEKDARHVVKVEYQENGPLFSELKFYQRVAKKDCIKKWIERKQLDYLGIPLFYGSGLTEFKGRSYRFMVMERLGIDLQKISGQNGTFKKSTVLQLGIRMLDVLEYIHENEYVHGDIKAANLLLGYKNPDQVYLADYGLSYRYCPNGNHKQYQENPRKGHNGTIEFTSLDAHKGVALSRRSDVEILGYCMLRWLCGKLPWEQNLKDPVAVQTAKTNLLDELPQSVLKWAPSGSSCCEIAQFLVCAHSLAYDEKPNYQALKKILNPHGIPLGPLDFSTKGQSINVHTPNSQKVDSQKAATKQVNKAHNRLIEKKVHSERSAESCATWKVQKEEKLIGLMNNEAAQFR

SEQ ID NO: 2262 - protein, 216 aa, Homo sapiens
MWPHSAGARPWASTLTGKDPRVMACWCLDGLPSGLAEPWRELWRWRSRPLHCVPPFSPLARSSRDHRNLRRRVEALPRILKGNIDGWRQNLEPSNNVEMFPPSGSTGLIPPSHFQARPLSTLPRMAPTWLSDIPLVQPPGHQDVSERRLDTQRPQVTMWERDVSSDRQEPGRRGRSWGLEGSQALSQQAEVIVRQLQELRRLEEEVRLLRETSLQQ

SEQ ID NO: 2263 - protein, 1885 aa, Homo sapiens
MSGALLWPLLPLLLLLLSARDGVRAAQPQAPGYLIAAPSVFRAGVEEVISVTIFNSPREVTVQAQLVAQGEPVVQSQGAILDKGTIKLKVPTGLRGQALLKVWGRGWQAEEGPLFHNQTSVTVDGRGASVFIQTDKPVYRPQHRVLISIFTVSPNLRPVNEKLEAYILDPRGSRMIEWRHLKPFCCGITNMSFPLSDQPVLGEWFIFVEMQGHAYNKSFEVQKYVLPKFELLIDPPRYIQDLDACETGTVRARYTFGKPVAGALMINMTVNGVGYYSHEVGRPVLRTTKILGSRDFDICVRDMIPADVPEHFRGRVSIWAMVTSVDGSQQVAFDDSTPVQRQLVDIRYSKDTRKQFKPGLAYVGKVELSYPDGSPAEGVTVQIKAELTPKDNIYTSEVVSQRGLVGFEIPSIPTSAQHVWLETKVMALNGKPVGAQYLPSYLSLGSWYSPSQCYLQLQPPSHPLQVGEEAYFSVKSTCPCNFTLYYEVAARGNIVLSGQQPAHTTQQRSKRAAPALEKPIRLTHLSETEPPPAPEAEVDVCVTSLHLAVTPSMVPLGRLLVFYVRENGEGVADSLQFAVETFFENQVSVTYSANETQPGEVVDLRIRAARGSCVCVAAVDKSVYLLRSGFRLTPAQVFQELEDYDVSDSFGVSREDGPFWWAGLTAQRRRRSSVFPWPWGITKDSGFAFTETGLVVMTDRVSLNHRQDGGLYTDEAVPAFQPHTGSLVAVAPSRHPPRTEKRKRTFFPETWIWHCLNISDPSGEGTLSVKVPDSITSWVGEAVALSTSQGLGIAEPSLLKTFKPFFVDFMLPALIIRGEQVKIPLSVYNYMGTCAEVYMKLSVPKGIQFVGHPGKRHVTKKMCVAPGEAEPIWVVLSFSDLGLNNITAKALAYGDTNCCRDGRSSKHPEENHADRRVPIGVDHVRRSVMVEAEGVPRAYTYSAFFCPSERVHISTPNKYEFQYVQRPLRLTRFDVAVRAHNDARVALSSGPQDTAGMIEIVLGGHQNTRSWISTSKMGEPVASAHTAKILSWDEFRTFWISWRGGLIQVGHGPEPSNESVIVAWTLPRPPEVQFIGFSTGWGSMGEFRIWRKMEVDESYSEAFTLGVPHGAIPGSERATASIIGDVMGPTLNHLNNLLRLPFGCGEQNMIHFAPNVFVLKYLQKTQQLSPEVERETTDYLVQGYQRQLTYKRQDGSYSAFGERDASGSMWLTAFVLKSFAQARSFIFVDPRELAAAKSWIIQQQQADGSFLAVGRVLNKDIQGGIHGTVPLTAYVVVALLETGTASEEERGSTDKARHFLESAAPLAMDPYSCALTTYALTLLRSPAAPEALRKLRSLAIMRDGVTHWSLSNSWDVDKGTFLSFSDRVSQSVVSAEVEMTAYALLTYTLLGDVAAALPVVKWLSQQRNALGGFSSTQDTCVALQALAEYAILSYAGGINLTVSLASTNLDYQETFELHRTNQKVLQTAAIPSLPTGLFVSAKGDGCCLMQIDVTYNVPDPVAKPAFQLLVSLQEPEAQGRPPPMPASAAEGSRGDWPPADDDDPAADQHHQEYKVMLEVCTRWLHAGSSNMAVLEVPLLSGFRADIESLEQLLLDKHMGMKRYEVAGRRVLFYFDEIPSRCLTCVRFRALRECVVGRTSALPVSVYDYYEPAFEATRFYNVSTHSPLARELCAGPACNEVERAPARGPGWFPGESGPAVAPEEGAAIARCGCDHDCGAQGNPVCGSDGVVYASACRLREAACRQAAPLEPAPPSCCALEQRLPASSSSTYGDDLASVAPGPLQQDVKLNGAGLEVEDSDPEPEGEAEDRVTAGPRPPVSSGNLESSTQSASPFHRWGQTPAPQRHSGRVVGAHRPGLLSPVFVYSPAFQSGGEEGLWMSNTCTLR

SEQ ID NO: 2264 - protein, 487 aa, Homo sapiens
MEFSSPSREECPKPLSRVSIMAGSLTGLLLLQAVSWASGARPCIPKSFGYSSVVCVCNATYCDSFDPPTFPALGTFSRYESTRSGRRMELSMGPIQANHTGTGIGYNIIRVPMASCDFSIRTYTYADTPDDFQLHNFSLPEEDTKLKIPLIHRALQLAQRPVSLLASPWTSPTWLKTNGAVNGKGSLKGQPGDIYHQTWARYFVKFLDAYAEHKLQFWAVTAENEPSAGLLSGYPFQCLGFTPEHQRDFIARDLGPTLANSTHHNVRLLMLDDQRLLLPHWAKVVLTDPEAAKYVHGIAVHWYLDFLAPAKATLGETHRLFPNTMLFASEACVGSKFWEQSVRLGSWDRGMQYSHSIITNLLYHVVGWTDWNLALNPEGGPNWVRNFVDSPIIVDITKDTFYKQPMFYHLGHFSKFIPEGSQRVGLVASQKNDLDAVALMHPDGSAVVVVLNRSSKDVPLTIKDPAVGFLETISPGYSIHTYLWRRQ

SEQ ID NO: 2265 - protein, 955 aa, Homo sapiens
MEVTCLLLLALIPFHCRGQGVYAPAQAQIVHAGQACVVKEDNISERVYTIREGDTLMLQCLVTGHPRPQVRWTKTAGSASDKFQETSVFNETLRIERIARTQGGRYYCKAENGVGVPAIKSIRVDVQYLDEPMLTVHQTVSDVRGNFYQEKTVFLRCTVNSNPPARFIWKRGSDTLSHSQDNGVDIYEPLYTQGETKVLKLKNLRPQDYASYTCQVSVRNVCGIPDKAITFRLTNTTAPPALKLSVNETLVVNPGENVTVQCLLTGGDPLPQLQWSHGPGPLPLGALAQGGTLSIPSVQARDSGYYNCTATNNVGNPAKKTVNLLVRSMKNATFQITPDVIKESENIQLGQDLKLSCHVDAVPQEKVTYQWFKNGKPARMSKRLLVTRNDPELPAVTSSLELIDLHFSDYGTYLCMASFPGAPVPDLSVEVNISSETVPPTISVPKGRAVVTVREGSPAELQCEVRGKPRPPVLWSRVDKEAALLPSGLPLEETPDGKLRLERVSRDMSGTYRCQTARYNGFNVRPREAQVQLNVQFPPEVEPSSQDVRQALGRPVLLRCSLLRGSPQRIASAVWRFKGQLLPPPPVVPAAAEAPDHAELRLDAVTRDSSGSYECSVSNDVGSAACLFQVSAKAYSPEFYFDTPNPTRSHKLSKNYSYVLQWTQREPDAVDPVLNYRLSIRQLNQHNAVVKAIPVRRVEKGQLLEYILTDLRVPHSYEVRLTPYTTFGAGDMASRIIHYTEPINSPNLSDNTCHFEDEKICGYTQDLTDNFDWTRQNALTQNPKRSPNTGPPTDISGTPEGYYMFIETSRPRELGDRARLVSPLYNASAKFYCVSFFYHMYGKHIGSLNLLVRSRNKGALDTHAWSLSGNKGNVWQQAHVPISPSGPFQIIFEGVRGPGYLGDIAIDDVTLKKGECPRKQTDPNKVVVMPGSGAPCQSSPQLWGPMAIFLLALQR

SEQ ID NO: 2266 - protein, 1506 aa, Homo sapiens
MPQIIKMTRILTAFKVVRTLKTGFGFTNVTAHQKWKFSRPGIRLLSVKAQTAHIVLEDGTKMKGYSFGHPSSVAGEVVFNTGLGGYPEAITDPAYKGQILTMANPIIGNGGAPDTTALDELGLSKYLESNGIKVSGLLVLDYSKDYNHWLATKSLGQWLQEEKVPAIYGVDTRMLTKIIRDKGTMLGKIEFEGQPVDFVDPNKQNLIAEVSTKDVKVYGKGNPTKVVAVDCGIKNNVIRLLVKRGAEVHLVPWNHDFTKMEYDGILIAGGPGNPALAEPLIQNVRKILESDRKEPLFGISTGNLITGLAAGAKTYKMSMANRGQNQPVLNITNKQAFITAQNHGYALDNTLPAGWKPLFVNVNDQTNEGIMHESKPFFAVQFHPEVTPGPIDTEYLFDSFFSLIKKGKATTITSVLPKPALVASRVEVSKVLILGSGGLSIGQAGEFDYSGSQAVKAMKEENVKTVLMNPNIASVQTNEVGLKQADTVYFLPITPQFVTEVIKAEQPDGLILGMGGQTALNCGVELFKRGVLKEYGVKVLGTSVESIMATEDRQLFSDKLNEINEKIAPSFAVESIEDALKAADTIGYPVMIRSAYALGGLGSGICPNRETLMDLSTKAFAMTNQILVEKSVTGWKEIEYEVVRDADDNCVTVCNMENVDAMGVHTGDSVVVAPAQTLSNAEFQMLRRTSINVVRHLGIVGECNIQFALHPTSMEYCIIEVNARLSRSSALASKATGYPLAFIAAKIALGIPLPEIKNVVSGKTSACFEPSLDYMVTKIPRWDLDRFHGTSSRIGSSMKSVGEVMAIGRTFEESFQKALRMCHPSIEGFTPRLPMNKEWPSNLDLRKELSEPSSTRIYAIAKAIDDNMSLDEIEKLTYIDKWFLYKMRDILNMEKTLKGLNSESMTEETLKRAKEIGFSDKQISKCLGLTEAQTRELRLKKNIHPWVKQIDTLAAEYPSVTNYLYVTYNGQEHDVNFDDHGMMVLGCGPYHIGSSVEFDWCAVSSIRTLRQLGKKTVVVNCNPETVSTDFDECDKLYFEELSLERILDIYHQEACGGCIISVGGQIPNNLAVPLYKNGVKIMGTSPLQIDRAEDRSIFSAVLDELKVAQAPWKAVNTLNEALEFAKSVDYPCLLRPSYVLSGSAMNVVFSEDEMKKFLEEATRVSQEHPVVLTKFVEGAREVEMDAVGKDGRVISHAISEHVEDAGVHSGDATLMLPTQTISQGAIEKVKDATRKIAKAFAISGPFNVQFLVKGNDVLVIECNLRASRSFPFVSKTLGVDFIDVATKVMIGENVDEKHLPTLDHPIIPADYVAIKAPMFSWPRLRDADPILRCEMASTGEVACFGEGIHTAFLKAMLSTGFKIPQKGILIGIQQSFRPRFLGVAEQLHNEGFKLFATEATSDWLNANNVPATPVAWPSQEGQNPSLSSIRKLIRDGSIDLVINLPNNNTKFVHDNYVIRRTAVDSGIPLLTNFQVTKLFAEAVQKSRKVDSKSLFHYRQYSAGKAA

SEQ ID NO: 2267 - protein, 1211 aa, Homo sapiens
MKNLLTEKCISSHNFHQKVIKQRMEKKVDSRYFKDGAVKKPYSAKTLSNKKSSASFGIRRELPSTSHLVQYRGTHTCTRQGRLRELRIRCVARKFLYLWIRMTFGRVFPSKARFYYEQRLLRKVFEEWKEEWWVFQHEWKLCVRADCHYRYYLYNLMFQTWKTYVRQQQEMRNKYIRAEVHDAKQKMRQAWKSWLIYVVVRRTKLQMQTTALEFRQRIILRVWWSTWRQRLGQVRVSRALHASALKHRALSLQVQAWSQWREQLLYVQKEKQKVVSAVKHHQHWQKRRFLKAWLEYLQVRRVKRQQNEMAERFHHVTVLQIYFCDWQQAWERRESLYAHHAQVEKLARKMALRRAFTHWKHYMLLCAEEAAQFEMAEEHHRHSQLLLHRFWNLWRSQIEQKKERELLPLLHAAWDHYRIALLCKCIELWLQYTQKRRYKQLLQARADGHFQQRALPAAFHTWNRLWRWRHQENVLSARATRFHRETLEKQVFSLWRQKMFQHRENRLAERMAILHAERQLLYRSWFMWHQQAAARHQEQEWQTVACAHHRHGRLKKAFCLWRESAQGLRTERTGRVRAAEFHMAQLLRWAWSQWRECLALRGAERQKLMRADLHHQHSVLHRALQAWVTYQGRVRSILREVAARESQHNRQLLRGALRRWKENTMARVDEAKKTFQASTHYRRTICSKVLVQWREAVSVQMYYRQQEDCAIWEAQKVLDRGCLRTWFQRWWDCSRRSAQQRLQLERAVQHHHRQLLLEGLARWKTHHLQCVRKRLLHRQSTQLLAQRLSRTCFRQWRQQLAARRQEQRATVRALWFWAFSLQAKVWATWLAFVLERRRKKARLQWALQAYQGQLLQEGATRLLRFAASMKASRQQLQAQQQVQAAHSLHRAVRRCATLWKQKVLGRGGKPQPLAAIAPSRKVTFEGPLLNRIAAGAGDGTLETKRPQASRPLGALGRLAAEEPHALELNTAHSARKQPRRPHFLLEPAQSQRPQKPQEHGLGMAQPAAPSLTRPFLAEAPTALVPHSPLPGALSSAPGPKQPPTASTGPELLLLPLSSFMPCGAAAPARVSAQRATPRDKPPVPSSLASVPDPHLLLPGDFSATRAGPGLSTAGSLDLEAELEEIQQQLLHYQTTKQNLWSCRRQASSLRRWLELNREEPGPEDQEVEQQVQKELEQVEMQIQLLAEELQAQRQPIGACVARIQALRQALC

SEQ ID NO: 2268 - protein, 1616 aa, Homo sapiens
MRKRKISVCQQTWALLCKNFLKKWRMKRESLMEWLNSLLLLLCLYIYPHSHQVNDFSSLLTMDLGRVDTFNESRFSVVYTPVTNTTQQIMNKVASTPFLAGKEVLGLPDEESIKEFTANYPEEIVRVTFTNTYSYHLKFLLGHGMPAKKEHKDHTAHCYETNEDVYCEVSVFWKEGFVALQAAINAAIIEITTNHSVMEELMSVTGKNMKMHSFIGQSGVITDLYLFSCIISFSSFIYYASVNVTRERKRMKALMTMMGLRDSAFWLSWGLLYAGFIFIMALFLALVIRSTQFIILSGFMVVFSLFLLYGLSLVALAFLMSILVKKSFLTGLVVFLLTVFWGCLGFTSLYRHLPASLEWILSLLSPFAFMLGMAQLLHLDYDLNSNAFPHPSDGSNLIVATNFMLAFDTCLYLALAIYFEKILPNEYGHRRPPLFFLKSSFWSQTQKTDHVALEDEMDADPSFHDSFEQAPPEFQGKEAIRIRNVTKEYKGKPDKIEALKDLVFDIYEGQITAILGHSGAGKSTLLNILSGLSVPTKGSVTIYNNKLSEMADLENLSKLTGVCPQSNVQFDFLTVRENLRLFAKIKGILPQEVDKEIQRVLLELEMKNIQDVLAQNLSGGQKRKLTFGIAILGDPQIFLLDEPTAGLDPFSRHQVWNLLKERKTDRVILFSTQFMDEADILADRKVFLSQGKLKCAGSSLFLKKKWGIGYHLSLQLNEICVEENITSLVKQHIPDAKLSAKSEGKLIYTLPLERTNKFPELYKDLDSYPDLGIENYGVSMTTLNEVFLKLEGKSTINESDIAILGEVQAEKADDTERLVEMEQVLSSLNKMRKTIGGVALWRQQICAIARVRLLKLKHERKALLALLLILMAGFCPLLVEYTMVKIYQNSYTWELSPHLYFLAPGQQPHDPLTQLLIINKTGASIDDFIQSVEHQNIALEVDAFGTRNGTDDPSYNGAITVCCNEKNYSFSLACNAKRLNCFPVLMDIVSNGLLGMVKPSVHIRTERSTFLENGQDNPIGFLAYIMFWLVLTSSCPPYIAMSSIDDYKNRARSQLRISGLSPSAYWFGQALVDVSLYFLVFVFIYLMSYISNFEDMLLTIIHIIQIPCAVGYSFSLIFMTYVISFIFRKGRKNSGIWSFCFYVVTVFSVAGFAFSIFESDIPFIFTFLIPPATMIGCLFLSSHLLFSSLFSEERMDVQPFLVFLIPFLHFIIFLFTLRCLEWKFGKKSMRKDPFFSSDVCQNPEEPEGEDEDVQMERVRTANALNSTNFDEKPVIIASCLRKEYAGKRKGCFSKRKNKIATRNVSFCVRKGEVLGLLGHNGAGKSTSIKVITGDTKPTAGQVLLKGSGGGDALEFLGYCPQENALWPNLTVRQHLEVYAAVKGLRKGDAEVAITRLVDALKLQDQLKSPVKTLSEGIKRKLCFVLSILGNPSVVLLDEPSTGMDPEGQQQMWQAIRATFRNTERGALLTTHYMAEAEAVCDRVAIMVSGRLRCIGSIQHLKSKFGKDYLLEMKVKNLAQVEPLHAEILRLFPQAARQERYSSLMVYKLPVEDVQPLAQAFFKLEKVKQSFDLEEYSLSQSTLEQVFLELSKEQELGDFEEDFDPSVKWKLLPQEEP

SEQ ID NO: 2269 - protein, 448 aa, Homo sapiens
MLDDRARMEAAKKEKVEQILAEFQLQEEDLKKVMRRMQKEMDRGLRLETHEEASVKMLPTYVRSTPEGSEVGDFLSLDLGGTNFRVMLVKVGEGEEGQWSVKTKHQMYSIPEDAMTGTAEMMKHKKLPLGFTFSFPVRHEDIDKGILLNWTKGFKASGAEGNNVVGLLRDAIKRRGDFEMDVVAMVNDTVATMISCYYEDHQCEVGMIVGTGCNACYMEEMQNVELVEGDEGRMCVNTEWGAFGDSGELDEFLLEYDRLVDESSANPGQQLYEKLIGGKYMGELVRLVLLRLVDENLLFHGEASEQLRTRGAFETRFVSQVESDTGDRKQIYNILSTLGLRPSTTDCDIVRRACESVSTRAAHMCSAGLAGVINRMRESRSEDVMRITVGVDGSVYKLHPSFKERFHASVRRLTPSCEITFIESEEGSGRGAALVSAVACKKACMLGQ

SEQ ID NO: 2270 - protein, 506 aa, Homo sapiens
MAWNSPSRRPVWQGGAPREDGGARGVWLPSSGQVSAQRTGRRLVGLEPTPTGSLTPRPPRPVPGMPRARKGNTLRKGGQRRGGGARSSAQADSGSSDDEAASEARSTASECPSLLSTTAEDSLGGDVVDEQGQQEDLEEKLKEYVDCLTDKSAKTRQGALESLRLALASRLLPDFLLERRLTLADALEKCLKKGKGEEQALAAAVLGLLCVQLGPGPKGEELFHSLQPLLVSVLSDSTASPAARLHCASALGLGCYVAAADIQDLVSCLACLESVFSRFYGLGGSSTSPVVPASLHGLLSAALQAWALLLTICPSTQISHILDRQLPRLPQLLSSESVNLRIAAGETIALLFELARDLEEEFVYEDMEALCSVLRTLATDSNKYRAKADRRRQRSTFRAVLHSVEGGECEEEIVRFGFEVLYMDSWARHRIYAAFKEVLGSGMHHHLQNNELLRDIFGLGPVLLLDATALKACKVPRFEKHLYNAAAFKARTKARSRVRDKRADIL

SEQ ID NO: 2271 - protein, 326 aa, Homo sapiens
MAAPEPLRPRLCRLVRGEQGYGFHLHGEKGRRGQFIRRVEPGSPAEAAALRAGDRLVEVNGVNVEGETHHQVVQRIKAVEGQTRLLVVDQETDEELRRRQLTCTEEMAQRGLPPAHDPWEPKPDWAHTGSHSSEAGKKDVSGPLRELRPRLCHLRKGPQGYGFNLHSDKSRPGQYIRSVDPGSPAARSGLRAQDRLIEVNGQNVEGLRHAEVVASIKAREDEARLLVVDPETDEHFKRLRVTPTEEHVEGPLPSPVTNGTSPAQLNGGSACSSRSDLPGSDKDTEESGLHLSPTAAEAKEKARAMRVNKRAPQMDWNRKREIFSNF

SEQ ID NO: 2272 - protein, 1095 aa, Homo sapiens
MAEGAAGREDPAPPDAAGGEDDPRVGPDAAGDCVTAASGGRMRDRRSGVALPGAAGTPADSEAGLLEAARATPRRSSIIKDPSNQKCGGRKKTVSFSSMPSEKKISSANDCISFMQAGCELKKVRPNSRIYNRFFTLDTDLQALRWEPSKKDLEKAKLDISAIKEIRLGKNTETFRNNGLADQICEDCAFSILHGENYESLDLVANSADVANIWVSGLRYLVSRSKQPLDFMEGNQNTPRFMWLKTVFEAADVDGNGIMLEDTSVELIKQLNPTLKEAKIRLKFKEIQKSKEKLTTRVTEEEFCEAFCELCTRPEVYFLLVQISKNKEYLDANDLMLFLEAEQGVTHITEDICLDIIRRYELSEEGRQKGFLAIDGFTQYLLSSECDIFDPEQKKVAQDMTQPLSHYYINASHNTYLIEDQFRGPADINGYIRALKMGCRSVELDVSDGSDNEPILCNRNNMTTHVSFRSVIEVINKFAFVASEYPLILCLGNHCSLPQQKVMAQQMKKVFGNKLYTEAPLPSESYLPSPEKLKRMIIVKGKKLPSDPDVLEGEVTDEDEEAEMSRRMSVDYNGEQKQIRLCRELSDLVSICKSVQYRDFELSMKSQNYWEMCSFSETEASRIANEYPEDFVNYNKKFLSRIYPSAMRIDSSNLNPQDFWNCGCQIVAMNFQTPGPMMDLHTGWFLQNGGCGYVLRPSIMRDEVSYFSANTKGILPGVSPLALHIKIISGQNFPKPKGACAKGDVIDPYVCIEIHGIPADCSEQRTKTVQQNSDNPIFDETFEFQVNLPELAMIRFVVLDDDYIGDEFIGQYTIPFECLQPGYRHVPLRSFVGDIMEHVTLFVHIAITNRSGGGKAQKRSLSVRMGKKVREYTMLRNIGLKTIDDIFKIAVHPLREAIDMRENMQNAIVSIKELCGLPPIASLKQCLLTLSSRLITSDNTPSVSLVMKDSFPYLEPLGAIPDVQKKMLTAYDLMIQESRFLIEMADTVQEKIVQCQKAGMEFHEELHNLGAKEGLKGRKLNKATESFAWNITVLKGQGDLLKNAKNEAIENMKQIQLACLSCGLSKAPSSSAEAKSKRSLEAIEEKESSEENGKL

SEQ ID NO: 2273 - protein, 468 aa, Homo sapiens
MMYFVIAAMKAQIEIIPCKICGDKSSGIHYGVITCEGCKGFFRRSQQSNATYSCPRQKNCLIDRTSRNRCQHCRLQKCLAVGMSRDAVKFGRMSKKQRDSLYAEVQKHRMQQQQRDHQQQPGEAEPLTPTYNISANGLTELHDDLSNYIDGHTPEGSKADSAVSSFYLDIQPSPDQSGLDINGIKPEPICDYTPASGFFPYCSFTNGETSPTVSMAELEHLAQNISKSHLETCQYLREELQQITWQTFLQEEIENYQNKQREVMWQLCAIKITEAIQYVVEFAKRIDGFMELCQNDQIVLLKAGSLEVVFIRMCRAFDSQNNTVYFDGKYASPDVFKSLGCEDFISFVFEFGKSLCSMHLTEDEIALFSAFVLMSADRSWLQEKVKIEKLQQKIQLALQHVLQKNHREDGILTKLICKVSTLRALCGRHTEKLMAFKAIYPDIVRLHFPPLYKELFTSEFEPAMQIDG

SEQ ID NO: 2274 - protein, 1133 aa, Homo sapiens
MTKKEEPPPSRVPRAVRVASLLSEGEELSGDDQGDEEEDDHAYEGVPNGGWHTSSLSLSLPSTIAAPHPMDGPPGGSTPVTPVIKAGWLDKNPPQGSYIYQKRWVRLDTDHLRYFDSNKDAYSKRFISVACISHVAAIGDQKFEVITNNRTFAFRAESDVERKEWMQALQQAMAEQRARARLSSAYLLGVPGSEQPDRAGSLELRGFKNKLYVAVVGDKVQLYKNLEEYHLGIGITFIDMSVGNVKEVDRRSFDLTTPYRIFSFSADSELEKEQWLEAMQGAIAEALSTSEVAERIWAAAPNRFCADCGAPQPDWASINLCVVICKRCAGEHRGLGAGVSKVRSLKMDRKVWTETLIEALCAAVTTTDLAETQALLGCGAGINCFSGDPEAPTPLALAEQAGQTLQMEFLRNNRTTEVPRLDSMKPLEKHYSVVLPTVSHSGFLYKTASAGKLLQDRRAREEFSRRWCVLGDGVLSYFENERAVTPNGEIRASEIVCLAVPPPDTHGFEHTFEVYTEGERLYLFGLESAEQAHEWVKCIAKAFVPPLAEDLLARDFERLGRLPYKAGLSLQRAQEGWFSLSGSELRAVFPEGPCEEPLQLRKLQELSIQGDSENQVLVLVERRRTLYIQGERRLDFMGWLGAIQKAAASMGDTLSEQQLGDSDIPVIVYRCVDYITQCGLTSEGIYRKCGQTSKTQRLLESLRQDARSVHLKEGEQHVDDVSSALKRFLRDLPDGLFTRAQRLTWLEASEIEDEEEKVSRYRELLVRLPPVNRATVKALISHLYCVQCFSDTNQMNVHNLAIVFGPTLFQTDGQDYKAGRVVEDLINHYVVVFSVDEEELRKQREEITAIVKMRVAGTASGTQHAGDFICTVYLEEKKAETEQHIKVPASMTAEELTLEILDRRNVGIREKDYWTCFEVNEREEAERPLHFAEKVLPILHGLGTDSHLVVKKHQAMEAMLLYLASRVGDTKHGMMKFREDRSLLGLGLPSGGFHDRYFILNSSCLRLYKEVRSHRPEKEWPIKSLKVYLGVKKKLRPPTCWGFTVVHETEKHEKQQWYLCCDTQMELREWFATFLFVQHDGLVWPSEPSRVSRAVPEVRLGSVSLIPLRGSENEMRRSVAAFTADPLSLLRNV

SEQ ID NO: 2275 - protein, 714 aa, Homo sapiens
MAGLTAAAPRPGVLLLLLSILHPSRPGGVPGAIPGGVPGGVFYPALGPGGKPLKPVPGGLAGAGLGAGLGAFPAVTFPGALVPGGVADAAAAYKAAKAGAGLGGVPGVGGLGVSAGAVVPQPGAGVKPGKVPGVGLPGVYPGGVLPGARFPGVGVLPGVPTGAGVKPKAPGVGGAFAGIPGVGPFGGPQPGVPLGYPIKAPKLPGGYGLPYTTGKLPYGYGPGGVAGAAGKAGYPTGTGVGPQAAAAAAAKAAAKFGAGAAGVLPGVGGAGVPGVPGAIPGIGGIAGVGTPAAAAAAAAAAKAAKYGAAAGLVPGGPGFGPGVVGVPGAGVPGVGVPGAGIPVVPGAGIPGAAVPGVVSPEAAAKAAAKAAKYGARPGVGVGGIPTYGVGAGGFPGFGVGVGGIPGVAGVPGVGGVPGVGGVPGVGISPEAQAAAAAKAAKYGVGTPAAAAAKAAAKAAQFGLVPGVGVAPGVGVAPGVGVAPGVGLAPGVGVAPGVGVAPGVGVAPGIGPGGVAAAAKSAAKVAAKAQLRAAAGLGAGIPGLGVGVGVPGLGVGAGVPGLGVGAGVPGFGAVPGALAAAKAAKYGAAVPGVLGGLGALGGVGIPGGVVGAGPAAAAAAAKAAAKAAQFGLVGAAGLGGLGVGGLGVPGVGGLGGIPPAAAAKAAKYGAAGLGGVLGGAGQFPLGGVAARPGFGLSPIFPGGACLGKACGRKRK

SEQ ID NO: 2276 - protein, 5388 aa, Homo sapiens
MAPIWGMDVPLPSDISLLLLFVFFIWRLWTLFSRNRSWKQVAAKINSETSKQHRLKKIQKLTGQRDPILYSSAQDPQWEENLRMACTEANLTCVSELPVGWTQEYILWSMERSLQQIFRYLESARSRLVEQDLPESQDMISSSTTSVLVAQKTVLCCCDYKKAKHSTDHSISFSSSCNDSSLSHLPVFSEGTTWEFRSHSLPISHKKQSSVFRNQGRTLPLFQLSEPQKSKIFQNLADLSPLQPQSSFINSISEPLNICKQKRKKNDERMSKSHLTSDHEPNSVSKERPRLPRWATFKLSPSVRRELEGHMSQKVFALRQQTAPLPLRKSWAMLNYITEVQGGVAESEKPQTQLSMPIHQNTEQNINNKSSDLPSFQLHVNAGVGSGSNSTETKLSQSLISDKQLQPGDGPQILGFKPLVTSMGSLPPRSLELNVIQEETPLLKNDPKHVLELSIEERVIGFPEKRIQQHKTQVTNVELTPRLSYQVKDSLKVTPLALLRVMDSMGMIPESHSEFAGLFSQLPSQVVKPMETMETVSITPKPPNQVIQSMEAAPRSQHQVMESERVATRLLNQVTDNKKVTPVALLQVMDSMGMINKSHPCIESVGMTPTPRYQVIESVKMNTLLNHQDTKPEKMNLRPQHAVTETVEMMPGPQHKVMESAGMTSGSQSQVMEQGKATPGLICQDTKSLEMISAPLHQVMGYVKGIPVALLQAMDFREIIPPAQPHVIESGGLTPSSQLQGRRSVHLVLPPEFQDINTVELTLRPPTEDTKSAELAPKPWLHDVRSEKVAPVLLLEDVKTPQMVECRRSIPETQVQGMKYGELNKGTQFKEVKAAEMSPKQNHEATEPERLTPWHQASESLEMISGPGYQGKEAKLTSDNCHQVEKSIGLTQPSLGTSPGPLSQTSESVEMSSVSFQDILKTMHQLGKAMGETPVSQHTTKESLDLIPGSEMQSVKSEGVTTEPQPHDMKFVYCNLGPCSEVTELSEIPPMSEYKETVGLALPQVAKTQGVIPVPPHSETGFLELTLGPGTQYEKSEPLLQNLKSMELTSESSPLLIGSKKLITEQKPHVMDLTPGPQLQGEKSKQLGLESQLQDMKHMNLIQQSTTGVVESEEMMPELPLQSMPLEDLTKREELQRVKSVDLNLGPSQPSVKSSELTSGPQLPSVRFSKIFPGPLLQGEKPVELISQPPHYGVKSDELTSDSPVQDIKLSDFIPEPTHQSVKFVQLTPESQPQDVKFVELSPGLFLQDVKFSDLIPEPKHQGFKHMQLTPGAQLEDIKSLDFVPESSLQSSQGTHIEDMKSVLSTEGSQFHSMKSAKLTSELPFQSVKSEEVNLGPWQQDIKFSELTSRPKLQGVNSADQTPGSMFHSVNFVEVVPKLGLQDSKLAKIFPGTQSMKQVGLNPELQLQDVKCFDLVPGTQPQGVKSLELNSGPQLQCVKVLEMTPGPKMQGVPPVTMAPGPEGEGVKPELLVPEPLFQGVKYVAGNQEPSLEAEVSYKLVSEPQMPDAESMELTPGPQLPSVNHSELTRQPQLQGIKSSELIQRPQLQNVNPVEWSPVLKLKGFRSEKLTSEPQLEDMTSAELISGPHLGDVKTMQLTPEPELEDVKSMTLTPEPQAGGVKLEEVTPGSKLQSELLTSGSHLEDMKSVTLTPGPCLESIKSMEITFPQPEGGKSVAITLGSQTEDVKSVEFTPDSELQGVKSVELTPCSRIQDLKTEELVLGTQLQDMKTAKLKLGLKMQGESMAFAPGPLLQGVKSMETLQRPQLQSVKPEELTSVPQMQDMKFVEITPCLKLRSLKSIKETQDPHLQCVKPVKLTPWQKRQAVKFVNITRGEEFEEVKSVDLALKQQFQGMAPVDLTLEPEQDGQISVNSQEQQCVNFEQVKKGSESEGVMSLELIPEPKSEGIKSVDLKSDLQSKGIKSSELTPESNMQDVKAKEFKHEPQLQSMKSPKLTPGPQLHQVKPLGSTVEPQIQSVKIVELNKELELGRMKSVQWITRPEFQGLKSVGLNLGSQSRSVKPAELKLSIQLGDMIASKLVLEPKLQGAKPMEFNRGPQLQCVKTSELSSGPQLQKGKMLASTSEPQLQGVKTVELNQDSQLTSVKSVQWIPGPEFQGVKTIGLNLGSQSQGVKPGESKSSIESGGVKSSQLTLGPKLQSVTSMEFNLGSQLHFVKAPELSQGPQLQKGKIPASTSEPYFQGVKTVELNQDSQLGNAKSVQWISGPEFQGVKTVGLNLGSQSRGVKPAELKSSTESGGVKSSELTLGPKLQGAKPVEFNFGPQLQCVKTPKMSRGPQLQKGKILASTSEPQLQGVKDVESNKDSQLGSVNSVQWIPGPEFQGVKSVLKCGSQSRVVTTVELKPSVQLRNVKSSELTPRPKLQSIQPLTSLQEHQLPGLKPIALKSGLQLRTVKSCGPISTSKLCDIKSMAFKPGLHSQDVKSSELTPRPQLHKVKPLEACPGTQLQDVKSPAFTQVPQFSGVKSGVLSQELPLQSDKTVALNSLLHLKSKKSSELAHQTELPGMKSEEFNSGPQWQCVKSSKLNPKTKSQDMKFRELNPSSQLKDIPYYDLTTRTKIQGVKSTDFKPGPQLQGVKSSESIPKTKLQEVKLMECNSGPRLQDLKSSRLIIGIKCQDIKSMDFSSGPHLQTVKSSEVIPGGKLQGVKSVEFKPSPKLQSEKSDLTLGRKFPGVKSVELESGPQLQDIKSSDLIMGIKLQDVKSMKFSSGQHFQGIKSSEVTSGTRLQSMKSMDFNSGQQTQSEKSSELIQGTNHQDVKSVEFHHGLKLQGVTSSELTPETKLQGGESVEFNSGPQWQDTKYSNSIMGTELQDVKSMEFSSGSHLQGMKSSEVIPATKLQKVKSVLMPRPMRQDVKSSELTVGTKVQDRTSLELSSTSQLQDRKLSMLTPGIHLQGVKSVEYNPGAKLEDMKSGLIKLQTVNSTEGNHDPELQVAKLSKLALESKIHSVAPSEFNAEKQQQDEKSHKLNPWPDLQSVKFMVFNPEPHLQHRKSSELCTGTKLQDVKSMKFNLQQQLQGVKSSELCLGTRLQGIQSLDFNPGPQLQGTKSAKLNPGPELQGIKSKVFCLGPHLQDVNSSVSIPEPPHQCVNSTGSNCGLPLQGVNSASIPAPKLQCISSNGCIPGPHLQGVNSAFIPQPKAHCVNSIGCNPGPYLQGMKSPELTPVSKLQGMKCSELNPGTEIQSETPMMFNPIPHLQGLKSELTPGSKLLRAAPMECNPGPQVQYVNSSELNPGLKLQCIDSMECKLAPHLQGVESGTKFQVMKFSELHPGPELQGIKSVVFNSVQHLQDVKCELTPGTKFQDITPKEFNSGPQLQGMNSEEFHSHLRQHNVRSVVFVPEPCSQDVKSVKSTLWPQPQSVNSSGLTSCFGSQCVKSVAFASKPCFQDVKPMELTPGAQQQGINYQELTSGWQDVKSMMLVPEPTRKFPSGPLLTSVRFSNLSPESQQQDVKSLEFTVEPKLQSVKHVKLSSVSLQQTIKSVELAPGSLPQRVKYGEQTPRTNYQIMESSELIPRPGHQFAKYAEMIPQPKYQIPKSANLISIPIYHATESSEMAQGLAYKGIDTVEKSVGLTPKLTGRAKESLGMLLQPDLQVPKFVDLTPMVRDQGSKFLGLTPEKSYQILETMELLSQSRPRVKDVGELYMKPLQQTVEYEGITPELKHYFTEAMGLTAEARIQANEFFGMTPKPTSQATGFAERSPRLCPQNLECVEVISEKRLQGEESVVLIPKSLHHVPDSASGMTPGLGHRVPESVELTSKSGVQVEKTLQLTPKPQHHVGSPGIISGLGHQVPESVNLTCKQWLQMEESLEVPLKQTSQVIGHEESVELTSEARQHREVSMGLTKSKNQSMKSPGTTPGPLGRIVEFMRISPEPLDQVTESARTQLQVAQSEEVILIDVPKVVQSVKVTPGPPFQIVKSVTIPRPTPQMVEYIELTPKLQYVRPSEHHTGPCLQDVKSTKLITKPKHQILETVELTGFQIVKTMLIPGPSLQIVKSEELAPGPIPQVVEPIGVALESGIEAINCVDLLPRPHLQELIVPAELTPSPCTQVKSAELTSPQTSPFEEHTILTHKQGLQAVKSTVIKTEPPKVMETEDLNLGHVCQNRDCQKLTSEELQVGTDFSRFLQSSSTTLISSSVRTASELGGLWDSGIQEVSRALDIKNPGTDILQPEETYIDPTMIQSLTFPLALHNQSSDKTANIVENPCPEILGVDVISKETTKRKQMEELENSLQRHLPQSWRSRSRTFQAESGVQKGLIKSFPGRQHNVWESHAWRQRLPRKYLSTMLMLGNILGTTMERKLCSQTSLAERATADTCQSIQNLFGIPAELMEPSQSLPEKGPVTISQPSVVKNYIQRHTFYHGHKKRMALRIWTRGSTSSIIQQYSGTRVRIKKTNSTFNGISQEVIQHMPVSCAGGQLPVLVKSESSLSIFYDREDLVPMEESEDSQSDSQTRISESQHSLKPNYLSQAKTDFSEQFQLLEDLQLKIAAKLLRSQIPPDVPPPLASGLVLKYPICLQCGRCSGLNCHHKLQTTSGPYLLIYPQLHLVRTPEGHGEVRLHLGFRLRIGKRSQISKYRERDRPVIRRSPISPSQRKAKIYTQASKSPTSTIDLQSGPSQSPAPVQVYIRRGQRSRPDLVEKTKTRAPGHYEFTQVHNLPESDSESTQNEKRAKVRTKKTSDSKYPMKRITKRLRKHRKFYTNSRTTIESPSRELAAHLRRKRIGATQTSTASLKRQPKKPSQPKFMQLLFQSLKRAFQTAHRVIASVGRKPVDGTRPDNLWASKNYYPKQNARDYCLPSSIKRDKRSADKLTPAGSTIKQEDILWGGTVQCRSAQQPRRAYSFQPRPLRLPKPTDSQSGIAFQTASVGQPLRTVQKDSSSRSKKNFYRNETSSQESKNLSTPGTRVQARGRILPGSPVKRTWHRHLKDKLTHKEHNHPSFYRERTPRGPSERTRHNPSWRNHRSPSERSQRSSLERRHHSPSQRSHCSPSRKNHSSPSERSWRSPSQRNHCSPPERSCHSLSERGLHSPSQRSHRGPSQRRHHSPSERSHRSPSERSHRSSSERRHRSPSQRSHRGPSERSHCSPSERRHRSPSQRSHRGPSERRHHSPSKRSHRSPARRSHRSPSERSHHSPSERSHHSPSERRHHSPSERSHCSPSERSHCSPSERRHRSPSERRHHSPSEKSHHSPSERSHHSPSERRRHSPLERSRHSLLERSHRSPSERRSHRSFERSHRRISERSHSPSEKSHLSPLERSRCSPSERRGHSSSGKTCHSPSERSHRSPSGMRQGRTSERSHRSSCERTRHSPSEMRPGRPSGRNHCSPSERSRRSPLKEGLKYSFPGERPSHSLSRDFKNQTTLLGTTHKNPKAGQVWRPEATR

SEQ ID NO: 2277 - protein, 589 aa, Homo sapiens
MASLGPRTPAPSRSRGRRAMCWVSTISFMAAEEMHWPVPMKAIGAQNLLTMPGGVAKAGYLHKKGGTQLQLLKWPLRFVIIHKRCVYYFKSSTSASPQGAFSLSGYNRVMRAAEETTSNNVFPFKIIHISKKHRTWFFSASSEEERKSWMALLRREIGHFHEKKDLPLDTSDSSSDTDSFYGAVERPVDISLSPYPTDNEDYEHDDEDDSYLEPDSPEPGRLEDALMHPPAYPPPPVPTPRKPAFSDMPRAHSFTSKGPGPLLPPPPPKHGLPDVGLAAEDSKRDPLCPRRAEPCPRVPATPRRMSDPPLSTMPTAPGLRKPPCFRESASPSPEPWTPGHGACSTSSAAIMATATSRNCDKLKSFHLSPRGPPTSEPPPVPANKPKFLKIAEEDPPREAAMPGLFVPPVAPRPPALKLPVPEAMARPAVLPRPEKPQLPHLQRSPPDGQSFRSFSFEKPRQPSQADTGGDDSDEDYEKVPLPNSVFVNTTESCEVERLFKATSPRGEPQDGLYCIRNSSTKSGKVLVVWDETSNKVRNYRIFEKDSKFYLEGEVLFVSVGSMVEHYHTHVLPSHQSLLLRHPYGYTGPR

SEQ ID NO: 2278 - protein, 470 aa, Homo sapiens
MLRAAARFGPRLGRRLLSAAATQAVPAPNQQPEVFCNQIFINNEWHDAVSRKTFPTVNPSTGEVICQVAEGDKALETLDNGKPYVISYLVDLDMVLKCLRYYAGWADKYHGKTIPIDGDFFSYTRHEPVGVCGQIIPWNFPLLMQAWKLGPALATGNVVVMKVAEQTPLTALYVANLIKEAGFPPGVVNIVPGFGPTAGAAIASHEDVDKVAFTGSTEIGRVIQVAAGSSNLKRVTLELGGKSPNIIMSDADMDWAVEQAHFALFFNQGQCCCAGSRTFVQEDIYDEFVERSVARAKSRVVGNPFDSKTEQGPQVDETQFKKILGYINTGKQEGAKLLCGGGIAADRGYFIQPTVFGDVQDGMTIAKEEIFGPVMQILKFKTIEEVVGRANNSTYGLAAAVFTKDLDKANYLSQALQAGTVWVNCYDVFGAQSPFGGYKMSGSGRELGEYGLQAYTEVKTVTVKVPQKNS

SEQ ID NO: 2279 - protein, 1189 aa, Homo sapiens
MDLPRGLVVAWALSLWPGFTDTFNMDTRKPRVIPGSRTAFFGYTVQQHDISGNKWLVVGAPLETNGYQKTGDVYKCPVIHGNCTKLNLGRVTLSNVSERKDNMRLGLSLATNPKDNSFLACSPLWSHECGSSYYTTGMCSRVNSNFRFSKTVAPALQRCQTYMDIVIVLDGSNSIYPWVEVQHFLINILKKFYIGPGQIQVGVVQYGEDVVHEFHLNDYRSVKDVVEAASHIEQRGGTETRTAFGIEFARSEAFQKGGRKGAKKVMIVITDGESHDSPDLEKVIQQSERDNVTRYAVAVLGYYNRRGINPETFLNEIKYIASDPDDKHFFNVTDEAALKDIVDALGDRIFSLEGTNKNETSFGLEMSQTGFSSHVVEDGVLLGAVGAYDWNGAVLKETSAGKVIPLRESYLKEFPEELKNHGAYLGYTVTSVVSSRQGRVYVAGAPRFNHTGKVILFTMHNNRSLTIHQAMRGQQIGSYFGSEITSVDIDGDGVTDVLLVGAPMYFNEGRERGKVYVYELRQNLFVYNGTLKDSHSYQNARFGSSIASVRDLNQDSYNDVVVGAPLEDNHAGAIYIFHGFRGSILKTPKQRITASELATGLQYFGCSIHGQLDLNEDGLIDLAVGALGNAVILWSRPVVQINASLHFEPSKINIFHRDCKRSGRDATCLAAFLCFTPIFLAPHFQTTTVGIRYNATMDERRYTPRAHLDEGGDRFTNRAVLLSSGQELCERINFHVLDTADYVKPVTFSVEYSLEDPDHGPMLDDGWPTTLRVSVPFWNGCNEDEHCVPDLVLDARSDLPTAMEYCQRVLRKPAQDCSAYTLSFDTTVFIIESTRQRVAVEATLENRGENAYSTVLNISQSANLQFASLIQKEDSDGSIECVNEERRLQKQVCNVSYPFFRAKAKVAFRLDFEFSKSIFLHHLEIELAAGSDSNERDSTKEDNVAPLRFHLKYEADVLFTRSSSLSHYEVKPNSSLERYDGIGPPFSCIFRIQNLGLFPIHGMMMKITIPIATRSGNRLLKLRDFLTDEVANTSCNIWGNSTEYRPTPVEEDLRRAPQLNHSNSDVVSINCNIRLVPNQEINFHLLGNLWLRSLKALKYKSMKIMVNAALQRQFHSPFIFREEDPSRQIVFEISKQEDWQVPIWIIVGSTLGGLLLLALLVLALWKLGFFRSARRRREPGLDPTPKVLE

SEQ ID NO: 2280 - protein, 822 aa, Homo sapiens
NRLQDEDASSTQQRRQIFRVNKDASGRSTNSHQSSTENELKYSEPRPWSSTDSDSSLRNLKPAVTKASSFSGISVLTRGDSSGSSKSIGRLSKTGSESSGSVGSSTGSLSHIQQPLPGTALSQSSHGAPVVYPTVSTHSSLSFDGGLNGQVASPSTSFFLLPLEAAGIPPGSILINPQTGQPFINPDGSPVVYNPPMTQQPVRSQVPGPPQPPLPAPPQQPAANHIFSQPVHPLQSSSQPVQYSTAPYPSPFLPVSPTQQYSVQDNLGSQFSHMSLARQPSADGSDPHAAMFQSTVVLQSPQQSGYIMTAAPPPHPPPPPPPPPPPPPLPPGQPVPTAGYPASGHPVSQPVLQQQGYIQQPSPQMPACYCAPGHYHSSQPQYRPVPSVHYNSHLNQPLPQPAQQTGYQVIPNQQQNYQGIVGVQQPQSQSLVSGQPNSIGNQIQGVVIPYTSVPTYQVSLPQGSQGIPHQTYQQPVMFPNQSNQGSMPTTGMPVYYSVIPPGQQNNLSSSVGYLQHPGSEQVQFPRTTSPCSSQQLQGHQCTAGPPPPPGGGMVMMQLSVPNNPQSCAHSPPQWKQNKYYCDHQRGQKCVEFSSVDNIVQHSPQLSSPIISPAQSPAPAQLSTLKTVRPSGPPLSIMPQFSRPFVPGQGDSRYPLLGQPLQYNPPAVLHGHIPNQQGQPGSRHGNRGRRQAKKAASTDLGAGETVVGKVLEITELPDGITRMEAEKLFGELFKIGAKIRWLRDPQSQPRRHPLCCGSGDNTANPERSKPSDLASTYTVLATFPSISAAQNALKKQINSVNKFKLRTSKKHYDFHILERASSQ

SEQ ID NO: 2281 - protein, 905 aa, Homo sapiens
MAGRVPSLLVLLVFPSSCLAFRSPLSVFKRFKETTRPFSNECLGTTRPVVPIDSSDFALDIRMPGVTPKQSDTYFCMSMRIPVDEEAFVIDFKPRASMDTVHHMLLFGCNMPSSTGSYWFCDEGTCTDKANILYAWARNAPPTRLPKGVGFRVGGETGSKYFVLQVHYGDISAFRDNNKDCSGVSLHLTRLPQPLIAGMYLMMSVDTVIPAGEKVVNSDISCHYKNYPMHVFAYRVHTHHLGKVVSGYRVRNGQWTLIGRQSPQLPQAFYPVGHPVDVSFGDLLAARCVFTGEGRTEATHIGGTSSDEMCNLYIMYYMEAKHAVSFMTCTQNVAPDMFRTIPPEANIPIPVKSDMVMMHEHHKETEYKDKIPLLQQPKREEEEVLDQGDFYSLLSKLLGEREDVVHVHKYNPTEKAESESDLVAEIANVVQKKDLGRSDAREGAEHERGNAILVRDRIHKFHRLVSTLRPPESRVFSLQQPPPGEGTWEPEHTGDFHMEEALDWPGVYLLPGQVSGVALDPKNNLVIFHRGDHVWDGNSFDSKFVYQQIGLGPIEEDTILVIDPNNAAVLQSSGKNLFYLPHGLSIDKDGNYWVTDVALHQVFKLDPNNKEGPVLILGRSMQPGSDQNHFCQPTDVAVDPGTGAIYVSDGYCNSRIVQFSPSGKFITQWGEESSGSSPLPGQFTVPHSLALVPLLGQLCVADRENGRIQCFKTDTKEFVREIKHSSFGRNVFAISYIPGLLFAVNGKPHFGDQEPVQGFVMNFSNGEIIDIFKPVRKHFDMPHDIVASEDGTVYIGDAHTNTVWKFTLTEKLEHRSVKKAGIEVQEIKDSEHKLETSSGRVLGRFRGKGSGGLNLGNFFASRKGYSRKGFDRLSTEGSDQEKEDDGSESEEEYSAPLPALAPSSS

SEQ ID NO: 2282 - protein, 90 aa, Homo sapiens
MSNPSAPPPYEDRNPLYPGPPPPGGYGQPSVLPGGYPAYPGYPQPGYGHPAGYPQPMPPTHPMPMNYGPGHGYDGEERAVSDSFGPGEWD

SEQ ID NO: 2283 - protein, 526 aa, Homo sapiens
MRPPQCLLHTPSLASPLLLLLLWLLGGGVGAEGREDAELLVTVRGGRLRGIRLKTPGGPVSAFLGIPFAEPPMGPRRFLPPEPKQPWSGVVDATTFQSVCYQYVDTLYPGFEGTEMWNPNRELSEDCLYLNVWTPYPRPTSPTPVLVWIYGGGFYSGASSLDVYDGRFLVQAERTVLVSMNYRVGAFGFLALPGSREAPGNVGLLDQRLALQWVQENVAAFGGDPTSVTLFGESAGAASVGMHLLSPPSRGLFHRAVLQSGAPNGPWATVGMGEARRRATQLAHLVGCPPGGTGGNDTELVACLRTRPAQVLVNHEWHVLPQESVFRFSFVPVVDGDFLSDTPEALINAGDFHGLQLAGRLAAQGARVYAYVFEHRASTLSWPLWMGVPHGYEIEFIFGIPLDPSRNYTAEEKIFAQRLMRYWANFARTGDPNEPRDPKAPQWPPYTAGAQQYVSLDLRPLEVRRGLRAQACAFWNRFLPKLLSATDTLDEAERQWKAEFHRWSSYMVHWKNQFDHYSKQDRCSDL

SEQ ID NO: 2284 - protein, 205 aa, Homo sapiens
MTPPERLFLPRVCGTTLHLLLLGLLLVLLPGAQGLPGVGLTPSAAQTARQHPKMHLAHSTLKPAAHLIGDPSKQNSLLWRANTDRAFLQDGFSLSNNSLLVPTSGIYFVYSQVVFSGKAYSPKATSSPLYLAHEVQLFSSQYPFHVPLLSSQKMVYPGLQEPWLHSMYHGAAFQLTQGDQLSTHTDGIPHLVLSPSTVFFGAFAL

SEQ ID NO: 2285 - protein, 420 aa, Homo sapiens
MDSSAAPTNASNCTDALAYSSCSPAPSPGSWVNLSHLDGNLSDPCGPNRTDLGGRDSLCPPTGSPSMITAITIMALYSIVCVVGLFGNFLVMYVIVRYTKMKTATNIYIFNLALADALATSTLPFQSVNYLMGTWPFGTILCKIVISIDYYNMFTSIFTLCTMSVDRYIAVCHPVKALDFRTPRNAKIINVCNWILSSAIGLPVMFMATTKYRQGSIDCTLTFSHPTWYWENLLKICVFIFAFIMPVLIITVCYGLMILRLKSVRMLSGSKEKDRNLRRITRMVLVVVAVFIVCWTPIHIYVIIKALVTIPETTFQTVSWHFCIALGYTNSCLNPVLYAFLDENFKRCFREFCIPTSSNIEQQNSTRIRQNTRDHPSTANTVDRTNHQVELNLDCHCENAKPWPLSYNAGQSPFPFPGRV

SEQ ID NO: 2286 - protein, 184 aa, Homo sapiens
AGGAFRGLRADGGGEPGRDPLPAVLQFGFVTIFVAACPLAPLFALLNNWVEIRLDARKFVCEYRRPVAERAQDIGIWFHILAGLTHLAVISNAFLLAFSSDFLPRAYYRWTRAHDLRGFLNFTLARAPSSFAAAHNRTCRYRAFRDDDGHYSQTYWNLLAIRLAFVIVFEHVVFSVGRLLDLLV

SEQ ID NO: 2287 - protein, 261 aa, Homo sapiens
MGIKTALPAAELGLYSLVLSGALAYAGRGLLEASQDGAHRKAFRESVRPGWEYIGRKMDVADFEWVMWFTSFRNVIIFALSGHVLFAKLCTMVAPKSGFVTGTFDLQEVLFHGGSSFTVLRCTSFALESCAHPDRHYSLADLLKYNFYLPFFFFGPIMTFDRFHAQVSQVEPVRREGELWHIRAQAGLSVVAIMAVDIFFHFFYILTIPSDLKFANRLPDSALAGLAYSNLVYDWVKAAVLFGVVNTVACLDHLDPPQPPK

SEQ ID NO: 2288 - protein, 2078 aa, Homo sapiens
MPGEATETVPATEQELPQPQAETAVLPMSSALSVTAALGQPGPTLPPPCSPAPQQCPLSAANQASPFPSPSTIASTPLEVPFPQSSSGTALPLGTAPEAPTFLPNLIGPPISPAALALASPMIAPTLKGTPSSSAPLALVALAPHSVQKSSAFPPNLLTSPPSVAVAESGSVITLSAPIAPSEPKTNLNKVPSEVVPNPKGTPSPPCIVSTVPYHCVTPMASIQSGVASLPQTTPTTTLAIASPQVKDTTISSVLISPQNPGSLSLKGPVSPPAALSLSTQSLPVVTSSQKTAGPNTPPDFPISLGSHLAPLHQSSFGSVQLLGQTGPSALSDPTVKTISVDHSSTGASYPSQRSVIPPLPSRNEVVPATVAAFPVVAPSVDKGPSTISSITCSPSGSLNVATSFSLSPTTSLILKSSPNATYHYPLVAQMPVSSVGTTPLVVTNPCTIAAAPTTTFEVATCVSPPMSSGPISNIEPTSPAALVMAPVAPKEPSTQVATTLRIPVSPPLPDPEDLKNLPSSVLVKFPTQKDLQTVPASLEGAPFSPAQAGLTTKKDPTVLPLVQAAPKNSPSFQSTSSSPEIPLSPEATLAKKSLGEPLPIGKPASSMTSPLGVNSSASVIKTDSYAGPDSAGPLLKSSLITPTVAAFPLESADPAGVAPTTAKGTSTYTTTASPFLEGTVSLAPKNHPVKEGTLTTLPLVPTASENCPVAPSPQNTCAPLATLVLAPEIPKSVPSPSLPPAGTPPGTKKVDGISHTSALAPVASSPKECPTEDSGASATASSKGTLTYLADSPSPLGVSVSPQTKRPPTKKGSAGPDTPIGNLSSPVSPVEASFLPENSLSFQGSKDSPATTHSPTPPSPKGAPTPSAVTPLSPKGVTLPPKETPTPSVVNLPFPKEGPATPAPKQAPALSMTSSSPKKARATPAPKGIPASPSPKGAPTPPAATPPSPKGGPATPSPKWAPTPPAATPPSPKGGPATPSPKGAPTPPAATPPSPKGGPATPSPKGAPTPPAVTPPSPKGSPAATPFPKGASTPPAATPPSPKGSPAATPLPKGAPTTPAATLPSPKGGPATPSLKGAPTPPAATPPSPKGGPATPSPKGAPMPPAATPPSPKGGLATPPHKGAPTTPAATPPSPKGGLATPPPKGAPTTPAATPPSPKGGLATPPPKGAPTTPAATPPSPKGGLATPSPKGAPTTPAATPPSPKGGLATPSPKGAPTTPAATPPSPKGGLATPSPKGAPTTPAATPPSPKGGPATPPPKGAPTPPAATPPSLKGGLATPPHKGAPNPAVVTPPSPKGGPATSPPKGAPTPPAATPPSPKGSPGTPPPKGAPTPPAVTPPSPKGTPTLPATTPSSKGGPTTPSSKEGPTPPAATPSHKGGPAMTPPSPKRGPAIPSPKGDPTSPAVIPLSPKKAPATPVTREGAATPSKGDLTPPAVTPVSLKKAPATSAPKGGPATPSSKGDPTLPAVTPPSPKEPPAPKQVATSSSPKKAPATPAPMGAPTLPAVIPSSPKEVPATPSSRRDPIAPTATLLSKKTPATLAPKEALIPPAMTVPSPKKTPAIPTPKEAPATPSSKEASSPPAVTPSTYKGAPSPKELLIPPAVTSPSPKEAPTPPAVTPPSPEKGPATPAPKGTPTSPPVTPSSLKDSPTSPASVTCKMGATVPQASKGLPAKKGPTALKEVLVAPAPESTPIITAPTRKGPQTKKSSATSPPICPDPSAKNGSKGPLSTVAPAPLLPVQKDSSKTAKGKDASHSPKGPLAPPESKASTPLTAAAFEKVLPKPESASVSAAPSPPVSLPLAPSPVPTLPPKQQFLPSSPGLVLESPSKPLAPADEDELLPLIPPEPISGGVPFQSVLVNMPTPKSAGIPVPTPSAKQPVTKNNKGSGTESDSDESVPELEEQDSTQATTQQAQLAAAAEIDEEPVSKAKQSRSEKKARKAMSKLGLRQVTGVTRVTIRKSKNILFVITKPDVYKSPASDTYIVFGEAKIEDLSQQAQLAAAEKFKVQGEAVSNIQENTQTPTVQEESEEEEVDETGVEVKDIELVMSQANVSRAKAVRALKNNSNDIVNAIMELTM

SEQ ID NO: 2289 - protein, 154 aa, Homo sapiens
MAGPVKDREAFQRLNFLYQAAHCVLAQDPENQALARFYCYTERTIAKRLVLRRDPSVKRTLCRGCSSLLVPGLTCTQRQRRCRGQRWTVQTCLTCQRSQRFLNDPGHLLWGDRPEAQLGSQADSKPLQPLPNTAHSISDRLPEEKMQTQGSSNQ

SEQ ID NO: 2290 - protein, 862 aa, Homo sapiens
MRLALLWALGLLGAGSPLPSWPLPNIGGTEEQQAESEKAPREPLEPQVLQDDLPISLKKVLQTSLPEPLRIKLELDGDSHILELLQNRELVPGRPTLVWYQPDGTRVVSEGHTLENCCYQGRVRGYAGSWVSICTCSGLRGLVVLTPERSYTLEQGPGDLQGPPIISRIQDLHLPGHTCALSWRESVHTQKPPEHPLGQRHIRRRRDVVTETKTVELVIVADHSEAQKYRDFQHLLNRTLEVALLLDTFFRPLNVRVALVGLEAWTQRDLVEISPNPAVTLENFLHWRRAHLLPRLPHDSAQLVTGTSFSGPTVGMAIQNSICSPDFSGGVNMDHSTSILGVASSIAHELGHSLGLDHDLPGNSCPCPGPAPAKTCIMEASTDFLPGLNFSNCSRRALEKALLDGMGSCLFERLPSLPPMAAFCGNMFVEPGEQCDCGFLDDCVDPCCDSLTCQLRPGAQCASDGPCCQNCQLRPSGWQCRPTRGDCDLPEFCPGDSSQCPPDVSLGDGEPCAGGQAVCMHGRCASYAQQCQSLWGPGAQPAAPLCLQTANTRGNAFGSCGRNPSGSYVSCTPRDAICGQLQCQTGRTQPLLGSIRDLLWETIDVNGTELNCSWVHLDLGSDVAQPLLTLPGTACGPGLVCIDHRCQRVDLLGAQECRSKCHGHGVCDSNRHCYCEEGWAPPDCTTQLKATSSLTTGLLLSLLVLLVLVMLGASYWYRARLHQRLCQLKGPTCQYRAAQSGPSERPGPPQRALLARGTKASALSFPAPPSRPLPPDPVSKRLQAELADRPNPPTRPLPADPVVRSPKSQGPAKPPPPRKPLPADPQGRCPSGDLPGPGAGIPPLVVPSRPAPPPPTVSSLYL

SEQ ID NO: 2291 - protein, 276 aa, Homo sapiens
MALHPRRVRLKPWLVAQVDSGLYPGLIWLHRDSKRFQIPWKHATRHSPQQEEENTIFKAWAVETGKYQEGVDDPDPAKWKAQLRCALNKSREFNLMYDGTKEVPMNPVKIYQVCDIPQPQGSIINPGSTGSAPWDEKDNDVDEEDEEDELDQSQHHVPIQDTFPFLNINGSPMAPASVGNCSVGNCSPEAVWPKTEPLEMEVPQAPIQPFYSSPELWISSLPMTDLDIKFQYRGKEYGQTMTVSNPQGCRLFYGDLGPMPDQEELFGPVSLEQVKF

SEQ ID NO: 2292 - protein, 427 aa, Homo sapiens
MALLWGLLVLSWSCLQGPCSVFSPVSAMEPLGRQLTSGPNQEQVSPLTLLKLGNQVQPGAQNHTLQRLQQVLHAGSGPCLPHLLSRLCQDLGPGAFRLAARMYLQKGFPIKEDFLEQSEQLFGAKPVSLTGKQEDDLANINQWVKEATEGKIQEFLSGLPEDTVLLLLNAIHFQGFWRNKFDPSLTQRDSFHLDEQFTVPVEMMQARTYPLRWFLLEQPEIQVAHFPFKNNMSFVVLVPTHFEWNVSQVLANLSWDTLHPPLVWERPTKVRLPKLYLKHQMDLVATLSQLGLQELFQAPDLRGISEQSLVVSGVQHQSTLELSEVGVEAAAATSIAMSRMSLSSFSVNRPFLFFIFEDTTGLPLFVGSVRNPNPSAPRELKEQQDSPGNKDFLQSLKGFPRGDKLFGPDLKLVPPMEEDYPQFGSPK

SEQ ID NO: 2293 - protein, 541 aa, Homo sapiens
MYGTVSCAQDWVPSRCCSSAGHGNFPYLCGNLNDVVVSPLLYTCYQNSQSVSRAYEQYGASAIQPISEEMQLLLTVYYLVQLAADQVPLMEDLEQIFLRSWRESHLTEIRQYQQAPPQPFPPAPSAAAPVTSAQLPWLASLAASSCNDSVHVIECAYSLAEGLSEMFRLLVEGKLAKTNYVVIICACRSAAIDSCIAVTGKYQARILSESLLTPAEYQKEVNYELVTGKVDSLGAFFSTLCPEGDIDILLDKFHQENQGHISSSLAASSVTKAASLDVSGTPVCTSYNLEPHSIRPFQLAVAQKLLSHVCSIADSSTQNLDLGSFEKVDFLICIPPSEVTYQQTLLHVWHSGVLLELGLKKEHMTKQRVEQYVLKLDTEAQTKFKAFLQNSFQNPHTLFVLIHDHAHWDLVSSTVHNLYSQSDPSVGLVDRLLNCREVKEAPNIVTLHVTSFPYALQTQHTLISPYNEIHWPASCSNGVDLYHENKKYFGLSEFIESTLSGHSLPLLRYDSSFEAMVTALGKRFPRLHSAVIRTFVLVQHY

SEQ ID NO: 2294 - protein, 242 aa, Homo sapiens
MPLRDKYCQTDHHHHGCCEPVYILEPGDPPLLQQPLQTSKSGIQQIIECFRSGTKQLKHILLKDVDTIFECKLCRSLFRGLPNLITHKKFYCPPSLQMDDNLPDVNDKQSQAINDLLEAIYPSVDKREYIIKLEPIETNQNAVFQYISRTDNPIEVTESSSTPEQTEVQIQETSTEQSKTVPVTDTEVETVEPPPVEIVTDEVAPTSDEQPQESQADLETSDNSDFGHQLICCLCRKEFNSR

SEQ ID NO: 2295 - protein, 167 aa, Homo sapiens
MLRLRSGLRHLRATPNTRGSARLLCAEMPKKAGATTKGKSQSKEPERPLPPLGPVAVDPKGCVTIAIHAKPGSKQNAVTDLTAEAVNVAIAAPPSEGEANAELCRYLSKVLELRKSDVVLDKTGSCYIAQAGLELLASSDLPASASQSAGITGVSHHTQPALLLISL

SEQ ID NO: 2296 - protein, 390 aa, Homo sapiens
MVMERLGIDLQKISGQNGTFKKSTVLQLGIRMLDVLEYIHENEYVHGDIKAANLLLGYKNPDQVYLADYGLSYRYCPNGNHKQYQENPRKGHNGTIEFTSLDAHKGVALSRRSDVEILGYCMLRWLCGKLPWEQNLKDPVAVQTAKTNLLDELPQSVLKWAPSGSSCCEIAQFLVCAHSLAYDEKPNYQALKKILNPHGIPLGPLDFSTKGQSINVHTPNSQKVDSQKAATKQVNKAHNRLIEKKVHSERSAESCATWKVQKEEKLIGLMNNEAAQESTRRRQKYQESQEPLNEVNSFPQKISYTQFPNSFYEPHQDFTSPDIFKKSRSPSWYKYTSTVSTGITDLESSTGLWPTISQFTLSEETNADVYYYRIIIPVLLMLVFLALFFL

SEQ ID NO: 2297 - protein, 1966 aa, Homo sapiens
MWIPTEHEKYGVVIASFRGTVPYGLSLEIGDTVQILEKCDGWYRGFALKNPNIKGIFPSSYVHLKNACVKNKGQFEMVIPTEDSVITEMTSTLRDWGTMWKQLYVRNEGDLFHRLWHIMNEILDLRRQVLVGHLTHDRMKDVKRHITARLDWGNEQLGLDLVPRKEYAMVDPEDISITELYRLMEHRHRKKDTPVQASSHHLFVQMKSLMCSNLGEELEVIFSLFDSKENRPISERFFLRLNRNGLPKAPDKPERHCSLFVDLGSSELRKDIYITVHIIRIGRMGAGEKKNACSVQYRRPFGCAVLSIADLLTGETKDDLILKVYMCNTESEWYQIHENIIKKLNARYNLTGSNAGLAVSLQLLHGDIEQIRREYSSVFSHGVSITRKLGFSNIIMPGEMRNDLYITIERGEFEKGGKSVARNVEVTMFIVDSSGQTLKDFISFGSGEPPASEYHSFVLYHNNSPRWSELLKLPIPVDKFRGAHIRFEFRHCSTKEKGEKKLFGFSFVPLMQEDGRTLPDGTHELIVHKCEENTNLQDTTRYLKLPFSKGIFLGNNNQAMKATKESFCITSFLCSTKLTQNGDMLDLLKWRTHPDKITGCLSKLKEIDGSEIVKFLQDTLDTLFGILDENSQKYGSKVFDSLVHIINLLQDSKFHHFKPVMDTYIESHFAGALAYRDLIKVLKWYVDRITEAERQEHIQEVLKAQEYIFKYIVQSRRLFSLATGGQNEEEFRCCIQELLMSVRFFLSQESKGSGALSQSQAVFLSSFPAVYSELLKLFDVREVANLVQDTLGSLPTILHVDDSLQAIKLQCIGKTVESQLYTNPDSRYILLPVVLHHLHIHLQEQKDLIMCARILSNVFCLIKKNSSEKSVLEEIDVIVASLLDILLRTILEITSRPQPSSSAMRFQFQDVTGEFVACLLSLLRQMTDRHYQQLLDSFNTKEELRDFLLQIFTVFRILIRPEMFPKDWTVMRLVANNVIITTVLYLSDALRKNFLNENFDYKIWDSYFYLAVIFINQLCLQLEMFTPSKKKKVLEKYGDMRVTMGCEIFSMWQNLGEHKLHFIPALIGPFLEVTLIPQPDLRNVMIPIFHDMMDWEQRRSGNFKQVEAKLIDKLDSLMSEGKGDETYRELFNSILLKKIERETWRESGVSLIATVTRLMERLLDYRDCMKMGEVDGKKIGCTVSLLNFYKTELNKEEMYIRYIHKLYDLHLKAQNFTEAAYTLLLYDELLEWSDRPLREFLTYPMQTEWQRKEHLHLTIIQNFDRGKCWENGIILCRKIAEQYESYYDYRNLSKMRMMEASLYDKIMDQQRLEPEFFRVGFYGKKFPFFLRNKEFVCRGHDYERLEAFQQRMLNEFPHAIAMQHANQPDETIFQAEAQYLQIYAVTPIPESQEVLQREGVPDNIKSFYKVNHIWKFRYDRPFHKGTKDKENEFKSLWVERTSLYLVQSLPGISRWFEVEKREVVEMSPLENAIEVLENKNQQLKTLISQCQTRQMQNINPLTMCLNGVIDAAVNGGVSRYQEAFFVKEYILSHPEDGEKIARLRELMLEQAQILEFGLAVHEKFVPQDMRPLHKKLVDQFFVMKSSLGIQEFSACMQASPVHFPNGSPRVCRNSAPASVSPDGTRVIPRRSPLSYPAVNRYSSSSLSSQASAEVSNITGQSESSDEVFNMQPSPSTSSLSSTHSASPNVTSSAPSSARASPLLSDKHKHSRENSCLSPRERPCSAIYPTPVEPSQRMLFNHIGDGALPRSDPNLSAPEKAVNPTPSSWSLDSGKEAKNMSDSGKLISPPVPPRPTQTASPARHTTSVSPSPAGRSPLKGSVQSFTPSPVEYHSPGLISNSPVLSGSYSSGISSLSRCSTSETSGFENQVNEQSAPLPVPVPVPVPSYGGEEPVRKESKTPPPYSVYERTLRRPVPLPHSLSIPVTSEPPALPPKPLAARSSHLENGARRTDPGPRPRPLPRKVSQL

SEQ ID NO: 2298 - protein, 296 aa, Homo sapiens
MLFMKMDLLNYQYLDKMNNNIGILCYEGEAALRGEPRIQTLPVASALSSHRTGPPPISPSKRKFSMEPGDEDLDCDNDHVSKMSRIFNPHLNKTANGDCRRDPRERSRSPIERAVAPTMSLHGSHLYTSLPSLGLEQPLALTKNSLDASRPAGLSPTLTPGERQQNRPSVITCASAGARNCNLSHCPIAHSGCAAPGPASYRRPPSAATTCDPVVEEHFRRSLGKNYKEPEPAPNSVSITGSVDDHFAKALGDTWLQIKAAKDGASSSPESASRRGQPASPSAHMVSHSHSPSVVS

SEQ ID NO: 2299 - protein, 547 aa, Homo sapiens
MEKARPLWANSLQFVFACISYAVGLGNVWRFPYLCQMYGGGSFLVPYIIMLIVEGMPLLYLELAVGQRMRQGSIGAWRTISPYLSGVGVASVVVSFFLSMYYNVINAWAFWYLFHSFQDPLPWSVCPLNGNHTGYDEECEKASSTQYFWYRKTLNISPSLQENGGVQWEPALCLLLAWLVVYLCILRGTESTGKVVYFTASLPYCVLIIYLIRGLTLHGATNGLMYMFTPKIEQLANPKAWINAATQIFFSLGLGFGSLIAFASYNEPSNNCQKHAIIVSLINSFTSIFASIVTFSIYGFKATFNYENCLKKVSLLLTNTFDLEDGFLTASNLEQVKGYLASAYPSKYSEMFPQIKNCSLESELDTAVQGTGLAFIVYTEAIKNMEVSQLWSVLYFFMLLMLGIGSMLGNTAAILTPLTDSKIISSHLPKEAISGLVCLVNCAIGMVFTMEAGNYWFDIFNDYAATLSLLLIVLVETIAVCYVYGLRRFESDLKAMTGRAVSWYWKVMWAGVSPLLIVSLFVFYLSDYILTGTLKYQAWDASQDDKL

SEQ ID NO: 2300 - protein, 289 aa, Homo sapiens
MSRESDVEAQQSHGSSACSQPHGSVTQSQGSSSQSQGISSSSTSTMPNSSQSSHSSSGTLSSLETVSTQELYSIPEDQEPEDQEPEEPTPAPWARLWALQDGFANLECVNDNYWFGRDKSCEYCFDEPLLKRTDKYRTYSKKHFRIFREVGPKNSYIAYIEDHSGNGTFVNTELVGKGKRRPLNNNSEIALSLSRNKVFVFFDLTVDDQSVYPKALRDEYIMSKTLGSGACGEVKLAFERKTCKKVAIKIISKRKFAIGSAREADPALNVETEIEILKKLNHDGRGRAV

SEQ ID NO: 2301 - protein, 387 aa, Homo sapiens
MASRCSEPYPEVSRIPTVRGCNGSLSGALSCCEDSARGSGPPKAPTVAEGPSSCLRRNVISERERRKRMSLSCERLRALLPQFDGRREDMASVLEMSVQFLRLASALGPSQEQHAILASSKEMWHSLQEDVLQLTLSSQIQAGVPDPGTGASSGTRTPDVKAFLESPWSLDPASASPEPVPHILASSRQWDPASCTSLGTDKCEALLGLCQVRGGLPPFSEPSSLVPWPPGRSLPKAVRPPLSWPPFSQQQTLPVMSGEALGWLGQAGPLAMGAAPLGEPAKEDPMLAQEAGSALGSDVDDGTSFLLTAGPSSWPGSLEGRGGSGPAWAPAESSPLDVGEPGFLGDPELGSQELQDSPLEPWGLDVDCAGLALKDEVESIFPDFFAC

SEQ ID NO: 2302 - protein, 616 aa, Homo sapiens
MEDSQDLNEQSVKKTCTESDVSQSQNSRSMEMQDLASPHTLVGGGDTPGSSKLEKSNLSSTSVTTNGTGVSLLAVKTEPLNSSETTATTGDGALDTFTGSVITSSGYSPRSAHQYSPQLYPSKPYPHILSTPAAQTMSAYAGQTQYSGMQQPAVYTAYSQTGQPYSLPTYDLGVMLPAIKTESGLSQTQSPLQSGCLSYSPGFSTPQPGQTPYSYQMPGSSFAPSSTIYANNSVSNSTNFSGSQQDYPSYTAFGQNQYAQYYSASTYGAYMTSNNTADGTPSSTSTYQLQESLPGLTNQPGEFDTMQSPSTPIKDLDERTCRSSGSKSRGRGRKNNPSPPPDSDLERVFVWDLDETIIVFHSLLTGSYAQKYGKDPPMAVTLGLRMEEMIFNLADTHLFFNDLEECDQVHIDDVSSDDNGQDLSTYSFATDGFHAAASSANLCLPTGVRGGVDWMRKLAFRYRRVKELYNTYKNNVGGLLGPAKRDAWLQLRAEIEGLTDSWLTNALKSLSIISTRSNCINVLVTTTQLIPALAKVLLYSLGGAFPIENIYSATKIGKESCFERIMQRFGRKVVYVVIGDGVEEEQAAKKHNMPFWRISSHSDLLALHQALELEYL

SEQ ID NO: 2303 - protein, 78 aa, Homo sapiens
GNTGMVGGSVPVFDEIILSTARMNRVLSFHSVSESPFYVLIETSGSNAGHDAEKLGHFLEHALGSGLVTDGTMATDQR

SEQ ID NO: 2304 - protein, 156 aa, Homo sapiens
MELRSYQWEVIMPALEGKNIIIWLPTGAGKTRAAAYVAKRHLETVDGAKVVVLVNRVHLVTQHGEEFRRMLDGRWTVTTLSGDMGPRAGFGHLARCHDLLICTAELLQMALTSPEEEEHVELTVFSLIVVDECHHTHKDTVYNVIMSQYLELKLQR

SEQ ID NO: 2305 - protein, 724 aa, Homo sapiens
MAEAGLRGWLLWALLLRLAQSEPYTTIHQPGYCAFYDECGKNPELSGSLMTLSNVSCLSNTPARKITGDHLILLQKICPRLYTGPNTQACCSAKQLVSLEASLSITKALLTRCPACSDNFVNLHCHNTCSPNQSLFINVTRVAQLGAGQLPAVVAYEAFYQHSFAEQSYDSCSRVRVPAAATLAVGTMCGVYGSALCNAQRWLNFQGDTGNGLAPLDITFHLLEPGQAVGSGIQPLNEGVARCNESQGDDVATCSCQDCAASCPAIARPQALDSTFYLGQMPGSLVLIIILCSVFAVVTILLVGFRVAPARDKSKMVDPKKGTSLSDKLSFSTHTLLGQFFQGWGTWVASWPLTILVLSVIPVVALAAGLVFTELTTDPVELWSAPNSQARSEKAFHDQHFGPFFRTNQVILTAPNRSSYRYDSLLLGPKNFSGILDLDLLLELLELQERLRHLQVWSPEAQRNISLQDICYAPLNPDNTSLYDCCINSLLQYFQNNRTLLLLTANQTLMGQTSQVDWKDHFLYCANAPLTFKDGTALALSCMADYGAPVFPFLAIGGYKGKDYSEAEALIMTFSLNNYPAGDPRLAQAKLWEEAFLEEMRAFQRRMAGMFQVTFMAERSLEDEINRTTAEDLPIFATSYIVIFLYISLALGSYSSWSRVMVDSKATLGLGGVAVVLGAVMAAMGFFSYLGIRSSLVILQVVPFLVLSVGADNIFIFVLEYQGP

SEQ ID NO: 2306 - protein, 215 aa, Homo sapiens
MSNPSAPPPYEDRNPLYPGPPPPGGYGQPSVLPGGYPAYPGYPQPGYGHPAGYPQPMPPTHPMPMNYGPGHGYDGEERAVSDSFGPGEWDDRKVRHTFIRKGTCQRLCEEKCGCLLRVLCCLRCHLPDPCLLPGTQTPFPMEHHSADPFYFCHGLHDGHHFQYVPNQSRHHCNDHHCGGIHFSHHLLLSDQGGLHLVHRPLLCPGNCAPGDWDCH

SEQ ID NO: 2307 - protein, 3060 aa, Homo sapiens
MHSSSYSYRSSDSVFSNTTSTRTSLDSNENLLLVHCGPTLINSCISFGSESFDGHRLEMLQQIANRVQRDSVICEDKLILAGNALQSDSKRLESGVQFQNEAEIAGYILECENLLRQHVIDVQILIDGKYYQADQLVQRVAKLRDEIMALRNECSSVYSKGRILTTEQTKLMISGITQSLNSGFAQTLHPSLTSGLTQSLTPSLTSSSMTSGLSSGMTSRLTPSVTPAYTPGFPSGLVPNFSSGVEPNSLQTLKLMQIRKPLLKSSLLDQNLTEEEINMKFVQDLLNWVDEMQVQLDRTEWGSDLPSVESHLENHKNVHRAIEEFESSLKEAKISEIQMTAPLKLTYAEKLHRLESQYAKLLNTSRNQERHLDTLHNFVSRATNELIWLNEKEEEEVAYDWSERNTNIARKKDYHAELMRELDQKEENIKSVQEIAEQLLLENHPARLTIEAYRAAMQTQWSWILQLCQCVEQHIKENTAYFEFFNDAKEATDYLRNLKDAIQRKYSCDRSSSIHKLEDLVQESMEEKEELLQYKSTIANLMGKAKTIIQLKPRNSDCPLKTSIPIKAICDYRQIEITIYKDDECVLANNSHRAKWKVISPTGNEAMVPSVCFTVPPPNKEAVDLANRIEQQYQNVLTLWHESHINMKSVVSWHYLINEIDRIRASNVASIKTMLPGEHQQVLSNLQSRFEDFLEDSQESQVFSGSDITQLEKEVNVCKQYYQELLKSAEREEQEESVYNLYISEVRNIRLRLENCEDRLIRQIRTPLERDDLHESVFRITEQEKLKKELERLKDDLGTITNKCEEFFSQAAASSSVPTLRSELNVVLQNMNQVYSMSSTYIDKLKTVNLVLKNTQAAEALVKLYETKLCEEEAVIADKNNIENLISTLKQWRSEVDEKRQVFHALEDELQKAKAISDEMFKTYKERDLDFDWHKEKADQLVERWQNVHVQIDNRLRDLEGIGKSLKYYRDTYHPLDDWIQQVETTQRKIQENQPENSKTLATQLNQQKMLVSEIEMKQSKMDECQKYAEQYSATVKDYELQTMTYRAMVDSQQKSPVKRRRMQSSADLIIQEFMDLRTRYTALVTLMTQYIKFAGDSLKRLEEEEKSLEEEKKEHVEKAKELQKWVSNISKTLKDAEKAGKPPFSKQKISSEEISTKKEQLSEALQTIQLFLAKHGDKMTDEERNELEKQVKTLQESYNLLFSESLKQLQESQTSGDVKVEEKLDKVIAGTIDQTTGEVLSVFQAVLRGLIDYDTGIRLLETQLMISGLISPELRKCFDLKDAKSHGLIDEQILCQLKELSKAKEIISAASPTTIPVLDALAQSMITESMAIKVLEILLSTGSLVIPATGEQLTLQKAFQQNLVSSALFSKVLERQNMCKDLIDPCTSEKVSLIDMVQRSTLQENTGMWLLPVRPQEGGRITLKCGRNISILRAAHEGLIDRETMFRLLSAQLLSGGLINSNSGQRMTVEEAVREGVIDRDTASSILTYQVQTGGIIQSNPAKRLTVDEAVQCDLITSSSALLVLEAQRGYVGLIWPHSGEIFPTSSSLQQELITNELAYKILNGRQKIAALYIPESSQVIGLDAAKQLGIIDNNTASILKNITLPDKMPDLGDLEACKNARRWLSFCKFQPSTVHDYRQEEDVFDGEEPVTTQTSEETKKLFLSYLMINSYMDANTGQRLLLYDGDLDEAVGMLLEGCHAEFDGNTAIKECLDVLSSSGVFLNNASGREKDECTATPSSFNKCHCGEPEHEETPENRKCAIDEEFNEMRNTVINSEFSQSGKLASTISIDPKVNSSPSVCVPSLISYLTQTELADISMLRSDSENILTNYENQSRVETNERANECSHSKNIQNFPSDLIENPIMKSKMSKFCGVNETENEDNTNRDSPIFDYSPRLSALLSHDKLMHSQGSFNDTHTPESNGNKCEAPALSFSDKTMLSGQRIGEKFQDQFLGIAAINISLPGEQYGQKSLNMISSNPQVQYHNDKYISNTSGEDEKTHPGFQQMPEDKEDESEIEEYSCAVTPGGDTDNAIVSLTCATPLLDETISASDYETSLLNDQQNNTGTDTDSDDDFYDTPLFEDDDHDSLLLDGDDRDCLHPEDYDTLQEENDETASPADVFYDVSKENENSMVPQGAPVGSLSVKNKAHCLQDFLMDVEKDELDSGEKIHLNPVGSDKVNGQSLETGSERECTNILEGDESDSLTDYDIVGGKESFTASLKFDDSGSWRGRKEEYVTGQEFHSDTDHLDSMQSEESYGDYIYDSNDQDDDDDDGIDEEGGGIRDENGKPRCQNVAEDMDIQLCASILNENSDENENINTMILLDKMHSCSSLEKQQRVNVVQLASPSENNLVTEKSNLPEYTTEIAGKSKENLLNHEMVLKDVLPPIIKDTESEKTFGPASISHDNNNISSTSELGTDLANTKVKLIQGSELPELTDSVKGKDEYFKNMTPKVDSSLDHIICTEPDLIGKPAEESHLSLIASVTDKDPQGNGSDLIKGRDGKSDILIEDETSIQKMYLGEGEVLVEGLVEEENRHLKLLPGKNTRDSFKLINSQFPFPQITNNEELNQKGSLKKATVTLKDEPNNLQIIVSKSPVQFENLEEIFDTSVSKEISDDITSDITSWEGNTHFEESFTDGPEKELDLFTYLKHCAKNIKAKDVAKPNEDVPSHVLITAPPMKEHLQLGVNNTKEKSTSTQKDSPLNDMIQSNDLCSKESISGGGTEISQFTPESIEATLSILSRKHVEDVGKNDFLQSERCANGLGNDNSSNTLNTDYSFLEINNKKERIEQQLPKEQALSPRSQEKEVQIPELSQVFVEDVKDILKSRLKEGHMNPQEVEEPSACADTKILIQNLIKRITTSQLVNEASTVPSDSQMSDSSGVSPMTNSSELKPESRDDPFCIGNLKSELLLNILKQDQHSQKITGVFELMRELTHMEYDLEKRGITSKVLPLQLENIFYKLLADGYSEKIEHVGDFNQKACSTSEMMEEKPHILGDIKSKEGNYYSPNLETVKEIGLESSTVWASTLPRDEKLKDLCNDFPSHLECTSGSKEMASGDSSTEQ

SEQ ID NO: 2308 - protein, 185 aa, Homo sapiens
MSSPLASLSKTRKVPLPSEPMNPGRRGIRIYGDVPASHDSELMAFMTRKLWDLEQQVKAQTDEILSKDQKIAALEDLVQTLRPHPAEATLQRQEELETMCVQLQRQVREMERFLSDYGLQWVGEPMDQEDSESKTVSEHGERDWMTAKKFWKPGDSLAPPEVDFDRLLASLQDLSELVVEGDTQV

SEQ ID NO: 2309 - protein, 242 aa, Homo sapiens
MLPPQKKPWESMAKGLVLGALFTSFLLLVYSYAVPPLHAGLASTTPEAAASCSPPALEPEAVIRANGSAGECQPRRNIVFLKTHKTASSTLLNILFRFGQKHRLKFAFPNGRNDFDYPTFFARSLVQDYRPGACFNIICNHMRFHYDEVRGLVPTNAIFITVLRDPARLFESSFHYFGPVVPLTWKLSAGDKLTEFLQDPDRYYDPNGFNAHYLRNLLFFDLGYDNSLDPSSPQVQEHILEV

SEQ ID NO: 2310 - protein, 148 aa, Homo sapiens
MSVEHADIWVKSYSLYSRERYICNSGFKRKAGTSSLTECVLNKATNVAHWTTPSLKCINPALVHQRPAPPSTVTTAGVTPQPESLSPSGKEPAASSPSSNNTAATTAAIVPGSQLMPSKSPSTGTTEISSHESSHGTPSQTTAKNWEL

SEQ ID NO: 2311 - protein, 1726 aa, Homo sapiens
MKKIFSKKGESPLGSFARRQRSSAGGGGEPGEGAYSQPGYHVRDRDLGKIHKAASAGNVAKVQQILLLRKNGLNDRDKMNRTALHLACANGHPEVVTLLVDRKCQLNVCDNENRTALMKAVQCQEEKCATILLEHGADPNLADVHGNTALHYAVYNEDISVATKLLLYDANIEAKNKDDLTPLLLAVSGKKQQMVEFLIKKKANVNAVDKLESSHQLISEYKEERIPKHSSQNSNSVDESSEDSLSSLFYFIFFETKSCTVAQAGVLQHDLSSLQSLLPGFTQFFCLHLPSSWDHRLSGKPGVDDSWPTSDDEDLNFDTKNVPKPSLAKLMTASQQSRKNLEATYGTVRTGNRTLFEDRDSDSQDEVVVESLPTTSIKVQCFSHPTYQSPDLLPKPSHKSLANPGLMKEEPTKPGIAKKENGIDIIESAPLEQTNNDNLTYVDEVHKNNRSDMMSALGLGQEEDIESPWDSESISENFPQKYVDPLAGAADGKEKNIGNEQAEESPERYLHLKPTIEMKDSVPNKAGGMKDVQTSKAAEHDLEVASEEEQEREGSENNQPQVEEERKKHRNNEMEVSANIHDGATDDAEDDDDDDGLIQKRKSGETDHQQFPRKENKEYASSGPALQMKEVKSTEKEKRTSKESVNSPVFGKASLLTGGLLQVDDDSSLSEIDEDEGRPTKKTSNEKNKVKNQIQSMDDVDDLTQSSETASEDCELPHSSYKNFMLLIEQLGMECKDSVSLLKIQDAALSCERLLELKKNHCELLTVKIKKMEDKVNVLQRELSETKEIKSQLEHQKVEWERELCSLRFSLNQEEEKRRNADTLYEKIREQLRRKEEQYRKEVEVKQQLELSLQTLEMELRTVKSNLNQVVQERNDAQRQLSREQNARMLQDGILTNHLSKQKEIEMAQKKMNSENSHSHEEEKDLSHKNSMLQEEIAMLRLEIDTIKNQNQEKEKKCFEDLKIVKEKNEDLQKTIKQNEETLTQTISQYNGRLSVLTAENAMLNSKLENEKQSKERLEAEVESYHSRLAAAIHDRDQSETSKRELELAFQRARDECSRLQDKMNFDVSNLKDNNEILSQQLFKTESKLNSLEIEFHHTRDALREKTLGLERVQKDLSQTQCQMKEMEQKYQNEQVKVNKYIGKQESVEERLSQLQSENMLLRQQLDDAHNKADNKEKTVINIQDQFHAIVQKLQAESEKQSLLLEERNKELISECNHLKERQYQYENEKAEREVVVRQLQQELADTLKKQSMSEASLEVTSRYRINLEDETQDLKKKLGQIRNQLQEAQDRHTEAVRCAEKMQDHKQKLEKDNAKLKVTVKKQMDKIEELQKNLLNANLSEDEKEQLKKLMELKQSLECNLDQEMKKNVELEREITGFKNLLKMTRKKLNEYENGEFSFHGDLKTSQFEMDIQINKLKHKIDDLTAELETAGSKCLHLDTKNQILQEELLSMKTVQKKCEKLQKNKKKLEQEVINLRSHIERNMVELGQVKQYKQEIEERARQEIAEKLKEVNLFLQAQAASQENLEQFRENNFASMKSQMELRIKDLESELSKIKTSQEDFNKTELEKYKQLYLEELKVRKSLSSKLTKTNERLAEVNTKLLVEKQQSRSLFTTLTTRPVMEPPCVGNLNNSLDLNRKLIPRENLVISTSNPRASNNSMENYLSKMQQELEKNITRELKEAAAELESGSIASPLGSTDESNLNQDLVWKASREYVQVLKKNYMI

SEQ ID NO: 2312 - protein, 154 aa, Homo sapiens
LVHQRPAPPSTVTTAGVTPQPESLSPSGKEPAASSPSSNNTAATTAAIVPGSQLMPSKSPSTGTTEISSHESSHGTPSQTTAKNWELTASASHQPPGVYPQGHSDTTVAISTSTVLLCGLSAVSLLACYLKSRASVCSCHPRSAGHTCSVGSVC

SEQ ID NO: 2313 - protein, 1189 aa, Homo sapiens
MVPCWNHGNITRSKAEELLSRTGKDGSFLVRASESISRAYALCVLYRNCVYTYRILPNEDDKFTVQASEGVSMRFFTKLDQLIEFYKKENMGLVTHLQYPVPLEEEDTGDDPEEDTVESVVSPPELPPRNIPLTASSCEAKEVPFSNENPRATETSRPSLSETLFQRLQSMDTSGLPEEHLKAIQDYLSTQLAQDSEFVKTGSSSLPHLKKLTTLLCKELYGEVIRTLPSLESLQRLFDQQLSPGLRPRPQVPGEANPINMVSKLSQLTSLLSSIEDKVKALLHEGPESPHRPSLIPPVTFEVKAESLGIPQKMQLKVDVESGKLIIKKSKDGSEDKFYSHKKILQLIKSQKFLNKLVILVETEKEKILRKEYVFADSKKREGFCQLLQQMKNKHSEQPEPDMITIFIGTWNMGNAPPPKKITSWFLSKGQGKTRDDSADYIPHDIYVIGTQEDPLSEKEWLEILKHSLQEITSVTFKTVAIHTLWNIRIVVLAKPEHENRISHICTDNVKTGIANTLGNKGAVGVSFMFNGTSLGFVNSHLTSGSEKKLRRNQNYMNILRFLALGDKKLSPFNITHRFTHLFWFGDLNYRVDLPTWEAETIIQKIKQQQYADLLSHDQLLTERREQKVFLHFEEEEITFAPTYRFERLTRDKYAYTKQKATGMKYNLPSWCDRVLWKSYPLVHVVCQSYGSTSDIMTSDHSPVFATFEAGVTSQFVSKNGPGTVDSQGQIEFLRCYATLKTKSQTKFYLEFHSSCLESFVKSQEGENEEGSEGELVVKFGETLPKLKPIISDPEYLLDQHILISIKSSDSDESYGEGCIALRLEATETQLPIYTPLTHHGELTGHFQGEIKLQTSQGKTREKLYDFVKTERDESSGPKTLKSLTSHDPMKQWEVTSRAPPCSGSSITEIINPNYMGVGPFGPPMPLHVKQTLSPDQQPTAWSYDQPPKDSPLGPCRGESPPTPPGQPPISPKKFLPSTANRGLPPRTQESRPSDLGKNAGDTLPQEDLPLTKPEMFENPLYGSLSSFPKPAPRKDQESPKMPRKEPPPCPEPGILSPSIVLTKAQEADRGEGPGKQVPAPRLRSFTCSSSAEGRAAGGDKSQGKPKTPVSSQAPVPAKRPIKPSRSEINQQTPPTPTPRPPLPVKSPAVLHLQHSKGRDYRDNTELPHHGKHRPEEGPPGPLGRTAMQ

SEQ ID NO: 2314 - protein, 143 aa, Homo sapiens
MLPPQKKPWESMAKGLVLGALFTSFLLLVYSYAVPPLHAGLASTTPEAAASCSPPALEPEAVIRANGSAGECQPRRNIVFLKTHKTASSTLLNILFRFGQKHRLKFAFPNGRNDFDYPTFFARSLVQDYRPGACFNIICNHMR

SEQ ID NO: 2315 - protein, 677 aa, Homo sapiens
AKALPKVMIPLSSIPTYNAAMDSNSFLKNSFHKFPYPTKAELCYLTVVTKYPEEQLKIWFTAQRLKQGISWSPEEIEDARKKMFNTVIQSVPQPTITVLNTPLVASAGNVQHLIQAALPGHVVGQPEGTGGGLLVTQPLMANGLQATSSPLPLTVTSVPKQPGVAPINTVCSNTTSAVKVVNAAQSLLTACPSITSQAFLDASIYKNKKSHEQLSALKGSFCRNQFPGQSEVEHLTKVTGLSTREVRKWFSDRRYHCRNLKGSRAMIPGDHSSIIIDSVPEVSFSPSSKVPEVTCIPTTATLATHPSAKRQSWHQTPDFTPTKYKERAPEQLRALESSFAQNPLPLDEELDRLRSETKMTRREIDSWFSERRKKVNAEETKKAEENASQEEEEAAEDEGGEEDLASELRVSGENGSLEMPSSHILAERKVSPIKINLKNLRVTEANGRNEIPGLGACDPEDDESNKLAEQLPGKVSCKKTAQQRHLLRQLFVQTQWPSNQDYDSIMAQTGLPRPEVVRWFGDSRYALKNGQLKWYEDYKRGNFPPGLLVIAPGNRELLQDYYMTHKMLYEEDLQNLCDKTQMSSQQVKQWFAEKMGEETRAVADTGSEDQGPGTGELTAVHKGMGDTYSEVSENSESWEPRVPEASSEPFDTSSPQAGRQLGSWSLSSQPLPSLLTL

SEQ ID NO: 2316 - protein, 42 aa, Homo sapiens
MLKNPYTIKKQPLHQFVQRPLFPLPAAFYHPGSHYVAQAKVQ

SEQ ID NO: 2317 - protein, 67 aa, Homo sapiens
MSNPSAPPPYEDRNPLYPGPPPPGGYGQPSVLPGGYPAYPGYPQPGYGHPAGYPQPMPPTHPMPMNY

SEQ ID NO: 2318 - protein, 488 aa, Homo sapiens
EYLQVRRVKRQQNEMAERFHHVTVLQIYFCDWQQAWERRESLYAHHAQVEKLARKMALRRAFTHWKHYMLLCAEEAAQFEMAEEHHRHSQLYFCFRALKDNVTHAHLQQIRRNLAHQQHGVTLLHRFWNLWRSQIEQKKERELLPLLHAAWDHYRIALLCKCIELWLQYTQKRRYKQLLQARADGHFQQRALPAAFHTWNRLWRWRHQENVLSARATRFHRETLEKQVFSLWRQKMFQHRENRLAERMAILHAERQLLYRSWFMWHQQAAARHQEQEWQTVACAHHRHGRLKKAFCLWRESAQGLRTESWSSGGKLCQCRCITDSRRTVPSGRPRRCWTGAVCGPGFSAGGTAAGGQPSRDCSWRGQCNTTTGSCCWRGWPGGRRTICSVSGRGSCTGRAPNCWHRDSAGPASASGDNSWQPGGRSSGRQCGPCGSGPSRCRQRCGPRGWPLYWKGGERRRGCSGRSRPTRGSSSRRVPRGSCALQPA

SEQ ID NO: 2319 - protein, 1249 aa, Homo sapiens
MSPAAAAAGAGERRRPIASVRDGRGRGCGGPARAVLLGLSLVGLLLYLVPAAAALAWLTVGATAAWWGLSREPRGSRPLSSFVRKARHRRPLSSFVRKARHRRTLFASPLAKSTANGNLLEPRTLLEGPDPAELLLMGSYLGKPGPPQPAAAPEGQDLRDRPGRRPPARPAPRSPPPRSPPPRSPPPSPPTHRAHHVYPSLPTPLLRPSRRPSPRDCGTLPNRFVITPRRRYPIHQAQYSCLGVLPTVCWNGYHKKAVLSPRNSRMVCSPVTVRIAPPDRRFSRSAIPEQIISSTLSSPSSNAPDPCAKETVLSALKEKEKKRTVEEEDQIFLDGQENKRRRHDSSGSGHSAFEPLVANGVPASFVPKPGSLKRGLNSQSSDDHLNKRSRSSSMSSLTGAYASGIPSSSRNAITSSYSSTRGISQLWKRNGPSSSPFSSPASSRSQTPERPAKKIREEELCHHSSSSTPLAADRESQGEKAADTTPRKKQNSNSQSTPGSSGQRKRKVQLLPSRRGEQLTLPPPPQLGYSITAEDLDLEKKASLQWFNQALEDKSDAASNSVTETPPITQPSFTFTLPAAAPASPPTSLLAPSTNPLLESLKKMQTPPSLPPCPESAGAATTEALSPPKTPSLLPPLGLSQSGPPGLLPSPSFDSKPPTTLLGLIPAPSMVPATDTKAPPTLQAETATKPQATSAPSPAPKQSFLFGTQNTSPSSPAAPAASSAPPMFKPIFTAPPKSEKEGPTPPGPSVTATAPSSSSLPTTTSTTAPTFQPVFSSMGPPASVPLPAPFFKQTTTPATAPTTTAPLFTGLASATSAVAPITSASPSTDSASKPAFGFGINSVSSSSVSTTTSTATAASQPFLFGAPQASAASFTPAMGSIFQFGKPPALPTTTTVTTFSQSLHTAVPTATSSSAADFSGFGSTLATSAPATSSQPTLTFSNTSTPTFNIPFGSSAKSPLPSYPGANPQPAFGAAEGQPPGAAKPALAPSFGSSFTFGNSAAPAAAPTPAPPSMIKVVPAYVPTPIHPIFGGATHSAFGLKATASAFGAPASSQPAFGGSTAVFFGAATSSGFGATTQTASSGSSSSVFGSTTPSPFTFGGSAAPAGSGSFGINVATPGSSTTTGAFSFGAGQSGSTATSTPFAGGLGQNALGTTGQSTPFAFNVSSTTESKPVFGGTATPTFGLNTPAPGVGTSGSSLSFGASSAPAQGFVGVAPFGSAALSFSIGAGSKTPGARQRLQARRQHTRKK

SEQ ID NO: 2320 - protein, 788 aa, Homo sapiens
MKKASRSVGSVPKVSAISKTQTAEKIKPENSSSASTGGKLVKPGTAASLSKTKSSDDLLAGMAGGVTVTNGVKGKKSTCPSAAPSASAPAMTTVENKSKISTGTASSTKRSTSTGNKESSSTRERLRERTRLNQSKKLPSAGQGANDMALAKRSRSRTATECDVRMSKSKSDNQISDRAALEAKVKDLLTLAKTKDVEILHLRNELRDMRAQLGINEDHSEGDEKSEKETIMAHQPTDVESTLLQLQEQNTAIREELNQLKNENRMLKDRLNALGFSLEQRLDNSEKLFGYQSLSPEITPGNQSDGGGTLTSSVEGSAPGSVEDLLSQDENTLMDHQHSNSMDNLDSECSEVYQPLTSSDDALDAPSSSESEGIPSIERSRKGSSGNASEVSVACLTERIHQMEENQHSTSEELQATLQELADLQQITQELNSENERLGEEKVILMESLCQQSDKLEHFSRQIEYFRSLLDEHHISYVIDEDVKSGRYMELEQRYMDLAENARFEREQLLGVQQHLSNTLKMAEQDNKEAQEMIGALKERSHHMERIIESEQKGKAALAATLEEYKATVASDQIEMNRLKAQLENEKQKVAELYSIHNSGDKSDIQDLLESVRLDKEKAETLASSLQEDLAHTRNDANRLQDAIAKVEDEYRAFQEEAKKQIEDLNMTLEKLRSDLDEKETERSDMKETIFELEDEVEQHRAVKLHDNLIISDLENTVKKLQDQKHDMEREIKTLHRRLREESAEWRQFQADLQTAVVIANDIKSEAQEEIGDLKRRLHEAQEKNEKL

SEQ ID NO: 2321 - protein, 945 aa, Homo sapiens
MTPALREATAKGISFSSLPSTMESDKMLYMESPRTVDEKLKGDTFSQMLGFPTPEPTLNTNFVNLKHFGSPQSSKHYQTVFLMRSNSTLNKHNENYKQKKLGEPSCNKLKNILYNGSNIQLSKICLSHSEEFIKKEPLSDTTSQCMKDVQIILDSNITKDTNVDKVQLQNCKWYQENALLDKVTDAEIKKGLLHCTQKKIVPGHSNVPVSSSAAEKEEEVHARLLHCVSKQKILLSQARRTQKHLQMLLAKHVVKHYGQQMKLSMKHQLPKMKTFHEPTTILGNSLPKCTEIKPEVNTLTAENKLWDDAKNGFARCTAAEIQRFAFSATGLLSHVEEGLDSDATDSSSDDDLDEYTLRKNVAVNCSTEWKWLVDRARVGSRWTWLQAQISDLECKIQQLTDIHRQIRASKGIVVLEECQLPKDILKKQMQFADQAASLNILGNPQVPQECQDPVPEQDFEMSPSSPTLLLRNIEKQSAQLTEIINSLIAPLNLSPTSSPLSSKSCSHKCLANGIYRSASENLDELSSSSSWLLNQKHSKKKRKDRTRLKSSSLTFMSTSARTRPLQSFHKRKLYRLSPTFYWTPQTLPSKETAFLNTTQMPCLQSASTWSSYEHNSESYLLREHVSELDSSFHSVLSLPSDVPLHFHFETLLKKTEIKGNLAENKFVDEYIISPSPGERTKLEESDFQHTESGSHSNFTAVSNVNVLSRIQNSSRNTARRRLRSESSYDIDNIVIPMSLVAPAKLEKLQYKEILTPSWRMVVLQPLDEYNLGKEEIEDLSDEVFSLRHKKYEEREQARWSLWEQSKWHRRNSRAYSKNVEGQDLLLKEYPNNFSSSQQCAAASPPGLPSENQDLCAYGLPSLNQSQETKSLWWERRAFPLKGEDMAALLCQDEKKDQVERSSTAFHGEIFGTSVPENGHHPKKQSDGMEEYKTFGLGLTNVKKNR

SEQ ID NO: 2322 - protein, 320 aa, Homo sapiens
MPHIDNDVKLDFKDVLLRPKRSTLKSRSEVDLTRSFSFRNSKQTYSGVPIIAANMDTVGTFEMAKVLCKHLAASSGTGSSDFEQLEQILEAIPQVKYICLDVANGYSEHFVEFVKDVRKRFPQHTIMAGNVVTGEMVEELILSGADIIKVGIGPGSVCTTRKKTGVGYPQLSAVMECADAAHGLKGHIISDGGCSCPGDVAKAFGAGADFVMLGGMLAGHSESGGELIERDGKKYKLFYGMSSEMAMKKYAGGVAEYRASEGKTVEVPFKGDVEHTIRDILGGIRSTCTYVGAAKLKELSRRTTFIRVTQQVNPIFSEAC

SEQ ID NO: 2323 - protein, 430 aa, Homo sapiens
MDEQPRLMHSHAGVGMAGHPGLSQHLQDGAGGTEGEGGRKQDIGDILQQIMTITDQSLDEAQARKHALNCHRMKPALFNVLCEIKEKTVLSIRGAQEEEPTDPQLMRLDNMLLAEGVAGPEKGGGSAAAAAAAAASGGAGSDNSVEHSDYRAKLSQIRQIYHTELEKYEQACNEFTTHVMNLLREQSRTRPISPKEIERMVSIIHRKFSSIQMQLKQSTCEAVMILRSRFLDARRKRRNFNKQATEILNEYFYSHLSNPYPSEEAKEELAKKCGITVSQVSNWFGNKRIRYKKNIGKFQEEANIYAAKTAVTATNVSAHGSQANSPSTPNSAGSSSSFNMSNSGDLFMSVQSLNGDSYQGAQVGANVQSQVDTLRHVISQTGGYSDGLAASQMYSPQGISANGGWQDATTPSSVTSPTEGPGSVHSDTSN

SEQ ID NO: 2324 - protein, 136 aa, Homo sapiens
MESEMETQSARAEEGFTQVTRKGGRRAKKRQAEQLSAAGEGGDAGRMDTEEARPAKRPVFPPLCGDGLLSGKEETRKIPVPANRYTPLKENWMKIFTPIVEHLGLQIRFNLKSRNVEIRCMQVVRPGAVGLRNISI

SEQ ID NO: 2325 - protein, 317 aa, Homo sapiens
MRFRFGVVVPPAVAGARPELLVVGSRPELGRWEPRGAVRLRPAGTAAGDGALALQEPGLWLGEVELAAEEAAQDGAEPGRVDTFWYKFLKREPGGELSWEGNGPHHDRCCTYNENNLVDGVYCLPIGHWIEATGHTNEMKHTTDFYFNIAGHQAMHYSRILPNIWLGSCPRQVEHVTIKLKHELGITAVMNFQTEWDIVQNSSGCNRYPEPMTPDTMIKLYREEGLAYIWMPTPDMSTEGRVQMLPQAVCLLHALLEKGHIVYVHCNAGVGRSTAAVCGWLQYVMGWNLRKVQYFLMAKRPAVYIDEEAASQDTFPL

SEQ ID NO: 2326 - protein, 246 aa, Homo sapiens
MASAGRSEGTAGGGAGPEEPRREEGRAGLSPSSPPGSHSMRYFYTSVSRPGRGEPRFISVGYVDDTQFVRFDSDAASPREEPRAPWIEQEGPEYWDRNTQIYKAQAQTDRESLRNLRGYYNQSEAGSHTLQSMYGCDVGPDGRLLRGHDQYAYDGKDYIALNEDLRSWTAADTAAQITQRKWEAAREAEQRRAYLEGECVEWLRRYLENGKDKLERADPPKTHVTHHPISDHEATLRCWALGFYPA

SEQ ID NO: 2327 - protein, 662 aa, Homo sapiens
MLKLSGEGLRDSYHSRRDQIALKNLQSDVTEAKSDFTKETLASQNTKMISSIVISQMIDENKSRENRASLPLPCAIAQSRAHHAKQSLANRSGVNIHRAFALLPGRLGIPAPSDERGPEAELPPKEERPCGGPRRGFASITITARRVGPPARALVWGTAGDSLCPKCRAEDTLFQAPPALANGAHPGRHQRSFACTEFSRNSSVVRLKVPEAHTGLCERRKYWVTHADDKETSFSPDTPLSGKSPLVFSSCVHLRVSQQCPDSIYYVDKSLSVPIEPPQIASPKMHRSVLSLNLNCSSHRLTADGVDGLVNREPISEALKQELLEGDQDLVGQRWNPGLQESHLKETPSLRRVHLGTGACPWSGSFPLENTELANVGANQVTVRKGEKDHTTHCHASDHANQLSIHIPGWSYRAVHTKVFSGSSKRQQGEVCMTVSAPPVEQKPTRHFLPIGDSSPSDDCLSRDLSEPTERRHQSFLKPRILFPGFLCPLQDVCASLQEDNGVQIESKFPKGDYTCCDLVVKIKECKKSEDPTTPEPSPAAPSPAPRDGAGSPGLSEDCSESQQTPARSLTLQEALEVRKPQFISRSQERLKKLEHMVQQRKAQRKEDLRQKQSLLPIRTSKKQFTIPHPLSDNLFKPKERCISEKEMHMRSKRIYDNLPEV

SEQ ID NO: 2328 - protein, 1714 aa, Homo sapiens
MSVSRTMEDSCELDLVYVTERIIAVSFPSTANEENFRSNLREVAQMLKSKHGGNYLLFNLSERRPDITKLHAKVLEFGWPDLHTPALEKICSICKAMDTWLNADPHNVVVLHNKGNRGRIGVVIAAYMHYSNISASADQALDRFAMKRFYEDKIVPIGQPSQRRYVHYFSGLLSGSIKMNNKPLFLHHVIMHGIPNFESKGGCRPFLRIYQAMQPVYTSGIYNIPGDSQTSVCITIEPGLLLKGDILLKCYHKKFRSPARDVIFRVQFHTCAIHDLGVVFGKEDLDDAFKDDRFPEYGKVEFVFSYGPEKIQGMEHLENGPSVSVDYNTSDPLIRWDSYDNFSGHRDDGMEEVVGHTQGPLDGSLYAKVKKKDSLHGSTGAVNATRPTLSATPNHVEHTLSVSSDSGNSTASTKTDKTDEPVPGASSATAALSPQEKRELDRLLSGFGLEREKQGAMYHTQHLRSRPAGGSAVPSSGRHVVPAQVHVNGGALASERETDILDDELPNQDGHSAGSMGTLSSLDGVTNTSEGGYPEALSPLTNGLDKSYPMEPMVNGGGYPYESASRAGPAHAGHTAPMRPSYSAQEGLAGYQREGPHPAWPQPVTTSHYAHDPSGMFRSQSFSEAEPQLPPAPVRGGSSREAVQRGLNSWQQQQQQQQQPRPPPRQQERAHLESLVASRPSPQPLAETPIPSLPEFPRAASQQEIEQSIETLNMLMLDLEPASAAAPLHKSQSVPGAWPGASPLSSQPLSGSSRQSHPLTQSRSGYIPSGHSLGTPEPAPRASLESVPPGRSYSPYDYQPCLAGPNQDFHSKSPASSSLPAFLPTTHSPPGPQQPPASLPGLTAQPLLSPKEATSDPSRTPEEEPLNLEGLVAHRVAGVQAREKQPAEPPAPLRRRAASDGQYENQSPEATSPRSPGVRSPVQCVSPELALTIALNPGGRPKEPHLHSYKEAFEEMEGTSPSSPPPSGVRSPPGLAKTPLSALGLKPHNPADILLHPTGEPRSYVESVARTAVAGPRAQDSEPKSFSAPATQAYGHEIPLRNGTLGGSFVSPSPLSTSSPILSADSTSVGSFPSGESSDQGPRTPTQPLLESGFRSGSLGQPSPSAQRNYQSSSPLPTVGSSYSSPDYSLQHFSSSPESQARAQFSVAGVHTVPGSPQARHRTVGTNTPPSPGFGWRAINPSMAAPSSPSLSHHQMMGPPGTGFHGSTVSSPQSSAATTPGSPSLCRHPAGVYQVSGLHNKVATTPGSPSLGRHPGAHQGNLASGLHSNAIASPGSPSLGRHLGGSGSVVPGSPCLDRHVAYGGYSTPEDRRPTLSRQSSASGYQAPSTPSFPVSPAYYPGLSSPATSPSPDSAAFRQGSPTPALPEKRRMSVGDRAGSLPNYATINGKVSSPVASGMSSPSGGSTVSFSHTLPDFSKYSMPDNSPETRAKVKFVQDTSKYWYKPEISREQAIALLKDQEPGAFIIRDSHSFRGAYGLAMKVSSPPPTIMQQNKKGDMTHELVRHFLIETGPRGVKLKGCPNEPNFGSLSALVYQHSIIPLALPCKLVIPNRDPTDESKDSSGPANSTADLLKQGAACNVLFVNSVDMESLTGPQAISKATSETLAADPTPAATIVHFKVSAQGITLTDNQRKLFFRRHYPLNTVTFCDLDPQERKWMKTEGGAPAKLFGFVARKQGSTTDNACHLFAELDPNQPASAIVNFVSKVMLNAGQKR

SEQ ID NO: 2329 - protein, 1049 aa, Homo sapiens
MKEENVKTVLMNPNIASVQTNEVGLKQADTVYFLPITPQFVTEVIKAEQPDGLILGMGGQTALNCGVELFKRGVLKEYGVKVLGTSVESIMATEDRQLFSDKLNEINEKIAPSFAVESIEDALKAADTIGYPVMIRSAYALGGLGSGICPNRETLMDLSTKAFAMTNQILVEKSVTGWKEIEYEVVRDADDNCVTVCNMENVDAMGVHTGDSVVVAPAQTLSNAEFQMLRRTSINVVRHLGIVGECNIQFALHPTSMEYCIIEVNARLSRSSALASKATGYPLAFIAAKIALGIPLPEIKNVVSGKTSACFEPSLDYMVTKIPRWDLDRFHGTSSRIGSSMKSVGEVMAIGRTFEESFQKALRMCHPSIEGFTPRLPMNKEWPSNLDLRKELSEPSSTRIYAIAKAIDDNMSLDEIEKLTYIDKWFLYKMRDILNMEKTLKGLNSESMTEETLKRAKEIGFSDKQISKCLGLTEAQTRELRLKKNIHPWVKQIDTLAAEYPSVTNYLYVTYNGQEHDVNFDDHGMMVLGCGPYHIGSSVEFDWCAVSSIRTLRQLGKKTVVVNCNPETVSTDFDECDKLYFEELSLERILDIYHQEACGGCIISVGGQIPNNLAVPLYKNGVKIMGTSPLQIDRAEDRSIFSAVLDELKVAQAPWKAVNTLNEALEFAKSVDYPCLLRPSYVLSGSAMNVVFSEDEMKKFLEEATRVSQEHPVVLTKFVEGAREVEMDAVGKDGRVISHAISEHVEDAGVHSGDATLMLPTQTISQGAIEKVKDATRKIAKAFAISGPFNVQFLVKGNDVLVIECNLRASRSFPFVSKTLGVDFIDVATKVMIGENVDEKHLPTLDHPIIPADYVAIKAPMFSWPRLRDADPILRCEMASTGEVACFGEGIHTAFLKAMLSTGFKIPQKGILIGIQQSFRPRFLGVAEQLHNEGFKLFATEATSDWLNANNVPATPVAWPSQEGQNPSLSSIRKLIRDGSIDLVINLPNNNTKFVHDNYVIRRTAVDSGIPLLTNFQVTKLFAEAVQKSRKVDSKSLFHYRQYSAGKAA

SEQ ID NO: 2330 - protein, 112 aa, Homo sapiens
MPRNQGFSEPEYSAEYSAEYSVSLPSDPDRGVGRTHEISVRNSGSCLCLPRFMRLTFVPESLENLYQTYFKRQRHETLLVLVVFAALFDCYVVVMCAVVFSSDKLASLAVAG

SEQ ID NO: 2331 - protein, 143 aa, Homo sapiens
MPGNIVFVLKKGNDNWATVMFNGQKGLVPCNYLEPVELRIHPQQQPQEESSPQSDIPAPPSSKAPGRPQLSPGQKQKEEPKEVKLSVPMPYTLKVHYKYTVVMKTQPGLPYSQVRDMVSKKLELRLEHTKLSYRPRDSNELVP

SEQ ID NO: 2332 - protein, 573 aa, Homo sapiens
MLQPGPHPPSPQAAAPGEAWPGPSQAPWQSLEEKMGSPEDDLIGIPFPDHSSELLSCLNEQRQLGHLCDLTIRTQGLEYRTHRAVLAACSHYFKKLFTEGGGGAVMGAGGSGTATGGAGAGVCELDFVGPEALGALLEFAYTATLTTSSANMPAVLQAARLLEIPCVIAACMEILQGSGLEAPSPDEDDCERARQYLEAFATATASGVPNGEDSPPQVPLPPPPPPPPRPVARRSRKPRKAFLQTKGARANHLVPEVPTVPAHPLTYEEEEVAGRVGSSGGSGPGDSYSPPTGTASPPEGPQSYEPYEGEEEEEELVYPPAYGLAQGGGPPLSPEELGSDEDAIDPDLMAYLSSLHQDNLAPGLDSQDKLVRKRRSQMPQECPVCHKIIHGAGKLPRHMRTHTGEKPFACEVCGVRFTRNDKLKIHMRKHTGERPYSCPHCPARFLHSYDLKNHMHLHTGDRPYECHLCHKAFAKEDHLQRHLKGQNCLEVRTRRRRKDDAPPHYPPPSTAAASPAGLDLSNGHLDTFRLSLARFWEQSAPTGPPVSTPGPPDDDEEEGAPTTPQAEGAMESS

SEQ ID NO: 2333 - protein, 941 aa, Homo sapiens
MVFLPLKWSLATMSFLLSSLLALLTVSTPSWCQSTEASPKRSDGTPFPWNKIRLPEYVIPVHYDLLIHANLTTLTFWGTTKVEITASQPTSTIILHSHHLQISRATLRKGAGERLSEEPLQVLEHPRQEQIALLAPEPLLVGLPYTVVIHYAGNLSETFHGFYKSTYRTKEGELRILASTQFEPTAARMAFPCFDEPAFKASFSIKIRREPRHLAISNMPLVKSVTVAEGLIEDHFDVTVKMSTYLVAFIISDFESVSKITKSGVKVSVYAVPDKINQADYALDAAVTLLEFYEDYFSIPYPLPKQDLAAIPDFQSGAMENWGLTTYRESALLFDAEKSSASSKLGITMTVAHELAHQWFGNLVTMEWWNDLWLNEGFAKFMEFVSVSVTHPELKVGDYFFGKCFDAMEVDALNSSHPVSTPVENPAQIREMFDDVSYDKGACILNMLREYLSADAFKSGIVQYLQKHSYKNTKNEDLWDSMASICPTDGVKGMDGFCSRSQHSSSSSHWHQEGVDVKTMMNTWTLQKGFPLITITVRGRNVHMKQEHYMKGSDGAPDTGYLWHVPLTFITSKSDMVHRFLLKTKTDVLILPEEVEWIKFNVGMNGYYIVHYEDDGWDSLTGLLKGTHTAVSSNDRASLINNAFQLVSIGKLSIEKALDLSLYLKHETEIMPVFQGLNELIPMYKLMEKRDMNEVETQFKAFLIRLLRDLIDKQTWTDEGSVSERMLRSQLLLLACVHNYQPCVQRAEGYFRKWKESNGNLSLPVDVTLAVFAVGAQSTEGWDFLYSKYQFSLSSTEKSQIEFALCRTQNKEKLQWLLDESFKGDKIKTQEFPQILTLIGRNPVGYPLAWQFLRKNWNKLVQKFELGSSSIAHMVMGTTNQFSTRTRLEEVKGFFSSLKENGSQLRCVQQTIETIEENIGWMDKNFDKIRVWLQSEKLERM

SEQ ID NO: 2334 - protein, 505 aa, Homo sapiens
MAQSVLVPPGPDSFRFFTRESLAAIEQRIAEEKAKRPKQERKDEDDENGPKPNSDLEAGKSLPFIYGDIPPEMVSVPLEDLDPYYINKKTFIVLNKGKAISRFSATPALYILTPFNPIRKLAIKILVHSLFNMLIMCTILTNCVFMTMSNPPDWTKNVEYTFTGIYTFESLIKILARGFCLEDFTFLRDPWNWLDFTVITFAYVTEFVDLGNVSALRTFRVLRALKTISVIPGLKTIVGALIQSVKKLSDVMILTVFCLSVFALIGLQLFMGNLRNKCLQWPPDNSSFEINITSFFNNSLDGNGTTFNRTVSIFNWDEYIEDKSHFYFLEGQNDALLCGNSSDAGQCPEGYICVKAGRNPNYGYTSFDTFSWAFLSLFRLMTQDFWENLYQLTLRAAGKTYMIFFVLVIFLGSFYLINLILAVVAMAYEEQNQATLEEAEQKEAEFQQMLEQLKKQQEEAQAAAAAASAESRDFSGAGGIGVFSESSSVASKLSSKSEKELKNRR

SEQ ID NO: 2335 - protein, 242 aa, Homo sapiens
AEGPSPPARWHRRLPGLWAAALLLLGLPRLSVRADGKFFVLESQNGSQGLQLEAARLSCKSRGAHLASADELRRVVQDCSFAVCTTGWLADGTLGTTVCSKGSGEQQIMRAVDVRIESNPVPGGTYSALCIKDEDEAEAHIDYEDNFPDDRSVSFRELMEDSRTEADEDRGQGDSSEEAPKQDRLVSISVGRENIARDKVFVPTTGLPGAGSSVPADSPGSRLLQKHLFWFPAEAFHKPGLE

SEQ ID NO: 2336 - protein, 360 aa, Homo sapiens
MAELQQLQEFEIPTGREALRGNHSALLRVADYCEDNYVQATDKRKALEETMAFTTQALASVAYQVGNLAGHTLRMLDLQGAALRQVEARMVNMHMEKVARREIGTLATVQRLPPGQKVIAPENLPPLTPYCRRPLNFGCLDDIGHGIKDLSTQLSRTGTLSRKSIKAPATPASATLGRPPRIPEPVHLPVVPDGRLSAASSAFSLASAGSAEGVGGAPTPKGQAAPPAPPLPSSLDPPPPPAAVEVFQRPPTLEELSPPPPDEELPLPLDLPPPPPLDGDELGLPPPPPGFGPDEPSWVPASYLEKVVTLYPYTSQKDNELSFSEGTVICVTRRYSDGWCEGVSSEGTGFFPGNYVEPSC

SEQ ID NO: 2337 - protein, 461 aa, Homo sapiens
MKMASFLAFLLLNFRVCLLLLQLLMPHSAQFSVLGPSGPILAMVGEDADLPCHLFPTMSAETMELKWVSSSLRQVVNVYADGKEVEDRQSAPYRGRTSILRDGITAGKAALRIHNVTASDSGKYLCYFQDGDFYEKALVELKVADGVGLYAVAASVIMRGSSGEGVSCTIRSSLLGLEKTASISIADPFFRSAQRWIAALAGTLPVLLLLLGGAGYFLWQQQEEKKTQFRKKKREQELREMAWSTMKQEQSTRVKLLEELRWRSIQYASRGERHSAYNEWKKALFKPADVILDPKTANPILLVSEDQRSVQRAKEPQDLPDNPERFNWHYCVLGCESFISGRHYWEVEVGDRKEWHIGVCSKNVQRKGWVKMTPENGFWTMGLTDGNKYRTLTEPRTNLKLPKPPKKVGVFLDYETGDISFYNAVDGSHIHTFLDVSFSEALYPVFRILTLEPTALTICPA

SEQ ID NO: 2338 - protein, 150 aa, Homo sapiens
MSNPSAPPPYEDRNPLYPGPPPPGGYGQPSVLPGGYPAYPGYPQPGYGHPAGYPQPMPPTHPMPMNYGPGHGYDGEERAVSDSFGPGEWDDRKVRHTFIRKVYSIISVQLLITVAIIAIFTFVEPVSAFVRRNVAVYYVSYAVFVVTYLI

SEQ ID NO: 2339 - protein, 160 aa, Homo sapiens
RFNAMLAALTPSRLAVAFQAMGAMKLGLTIAIRYSHRYAGALLDEDVFQGKELVNSRSLQALVAGLKAYSTWENIRCLQDCRECTGGMGYMMENRISGLKCDTDVFATFEGDDVVMLQVVGRELLAQYTKQYEEKPLFGLLQNWAESVGDKLRTSFLAFN

SEQ ID NO: 2340 - protein, 2439 aa, Homo sapiens
MVQRWLLLSCCGALLSAGLANTSYTSPGLQRLKDSPQTAPDKGQCSTWGAGHFSTFDHHVYDFSGTCNYIFAATCKDAFPTFSVQLRRGPDGSISRIIVELGASVVTVSEAIISVKDIGVISLPYTSNGLQITPFGQSVRLVAKQLELELEVVWGPDSHLMVLVERKYMGQMCGLCGNFDGKVTNEFVSEEGKFLEPHKFAALQKLDDPGEICTFQDIPSTHVRQAQHARICTQLLTLVAPECSVSKEPFVLSCQADVAAAPQPGPQNSSCATLSEYSRQCSMVGQPVRRWRSPGLCSVGQCPANQVYQECGSACVKTCSNPQHSCSSSCTFGCFCPEGTVLNDLSNNHTCVPVTQCPCVLHGAMYAPGEVTIAACQTCRCTLGRWVCTERPCPGHCSLEGGSFVTTFDARPYRFHGTCTYILLQSPQLPEDGALMAVYDKSGVSHSETSLVAVVYLSRQDKIVISQDEVVTNNGEAKWLPYKTRNITVFRQTSTHLQMATSFGLELVVQLRPIFQAYVTVGPQFRGQTRGLCGNFNGDTTDDFTTSMGIAEGTASLFVDSWRAGNCPAALERETDPCSMSQLNKVCAETHCSMLLRTGTVFERCHATVNPAPFYKRCVYQACNYEETFPHICAALGDYVHACSLRGVLLWGWRSSVDNCTIPCTGNTTFSYNSQACERTCLSLSDRATECHHSAVPVDGCNCPDGTYLNQKGECVRKAQCPCILEGYKFILAEQSTVINGITCHCINGRLSCPQRPQMFLASCQAPKTFKSCSQSSENKFGAACAPTCQMLATGVACVPTKCEPGCVCAEGLYENADGQCVPPEECPCEFSGVSYPGGAELHTDCRTCSCSRGRWACQQGTHCPSTCTLYGEGHVITFDGQRFVFDGNCEYILATDVCGVNDSQPTFKILTENVICGNSGVTCSRAIKIFLGGLSVVLADRNYTVTGEEPHVQLGVTPGALSLVVDISIPGRYNLTLIWNRHMTILIRIARASQDPLCGLCGNFNGNMKDDFETRSRYVASSELELVNSWKESPLCGDVSFVTDPCSLNAFRRSWAERKCSVINSQTFATCHSKVYHLPYYEACVRDACGCDSGGDCECLCDAVAAYAQACLDKGVCVDWRTPAFCPIYCGFYNTHTQDGHGEYQYTQEANCTWHYQPCLCPSQPQSVPGSNIEGCYNCSQDEYFDHEEGVCVPCMPPTTPQPPTTPQLPTTGSRPTQVWPMTGTSTTIGLLSSTGPSPSSNHTPASPTQTPLLPATLTSSKPTASSGEPPRPTTAVTPQATSGLPPTATLRSTATKPTVTQATTRATASTASPATTSTAQSTTRTTMTLPTPATSGTSPTLPKSTNQELPGTTATQTTGPRPTPASTTGPTTPQPGQPTRPTATETTQTRTTTEYTTPQTPHTTHSPPTAGSPVPSTGPVTATSFHATTTYPTPSHPETTLPTHVPPFSTSLVTPSTHTVITPTHAQMATSASNHSAPTGTIPPPTTLKATGSTHTAPPITPTTSGTSQAHSSFSTNKTPTSLHSHTSSTHHPEVTPTSTTTITPNPTSTRTRTPVAHTNSATSSRPPPPFTTHSPPTGSSPFSSTGPMTATSFKTTTTYPTPSHPQTTLPTHVPPFSTSLVTPSTHTVITPTHAQMATSASIHSMPTGTIPPPTTLKATGSTHTAPTMTLTTSGTSQALSSLNTAKTSTSLHSHTSSTHHAEATSTSTTNITPNPTSTGTPPMTVTTSGTSQSRSSFSTAKTSTSLHSHTSSTHHPEVTSTSTTSITPNHTSTGTRTPVAHTTSATSSRLPTPFTTHSPPTGTTPISSTGPVTATSFQTTTTYPTPSHPHTTLPTHVPSFSTSLVTPSTHTVIIPTHTQMATSASIHSMPTGTIPPPTTIKATGSTHTAPPMTPTTSGTSQSPSSFSTAKTSTSLPYHTSSTHHPEVTPTSTTNITPKHTSTGTRTPVAHTTSASSSRLPTPFTTHSPPTGSSPFSSTGPMTATSFQTTTTYPTPSHPQTTLPTHVPPFSTSLVTPSTHTVIITTHTQMATSASIHSTPTGTVPPPTTLKATGSTHTAPPMTVTTSGTSQTHSSFSTATASSSFISSSSWLPQNSSSRPPSSPITTQLPHLSSATTPVSTTNQLSSSFSPSPSAPSTVSSYVPSSHSSPQTSSPSVGTSSSFVSAPVHSTTLSSGSHSSLSTHPTTASVSASPLFPSSPAASTTIRATLPHTISSPFTLSALLPISTVTVSPTPSSHLASSTIAFPSTPRTTASTHTAPAFSSQSTTSRSTSLTTRVPTSGFVSLTSGVTGIPTSPVTNLTTRHPGPTLSPTTRFLTSSLTAHGSTPASAPVSSLGTPTPTSPGVCSVREQQEEITFKGCMANVTVTRCEGACISAASFNIITQQVDARCSCCRPLHSYEQQLELPCPDPSTPGRRLVLTLQVFSHCVCSSVACGD

SEQ ID NO: 2341 - protein, 404 aa, Homo sapiens
MEETIKDPPTSAVLLDHCHFSQVIFNSVEKFYIPGGDVTCHYTFTQHFIPRRKDWIGIFRVGWKTTREYYTFMWVTLPIDLNNKSAKQQEVQFKAYYLPKDDEYYQFCYVDEDGVVRGASIPFQFRPENEEDILVVTTQEELETLQSINKKLELKVKEQKDYWETELLQLKEQNQKMSSENEKMGIRVDQLQAQLSTQEKEMEKLVQGDQDKTEQLEQLKKENDHLFLSLTEQRKDQKKLEQTVEQMKQNETTAMKKQQELMDENFDLSKRLSENEIICNALQRQKERLEGENDLLKRENSRLLSYMGLDFNSLPYQVPTSDEGGARQNPGLAYGNPYSGIQESSSPSPLSIKKCPICKADDICDHTLEQQQMQPLCFNCPICDKIFPATEKQIFEDHVFCHSL

SEQ ID NO: 2342 - protein, 310 aa, Homo sapiens
GSTGTRVHVFQFTRPPRETPTLTHETFKALKPGLSAYADDVEKSAQGIRELLDVAKQDIPFDFWKATPLVLKATAGLRLLPGEKAQKLLQKVKKVFKASPFLVGDDCVSIMNGTDEGVSAWITINFLTGSLKTPGGSSVGMLDLGGGSTQIAFLPRVEGTLQASPPGYLTALRMFNRTYKLYSYSYLGLGLMSARLAILGGVEGQPAASLHELCAARVSEVLQNRVHRTEEVKHVDFYAFSYYYDLAAGVGLIDAEKGGSLVVGDFEIAAKYVCRTLETQPQSSPFSCMDLTYVSLLLQEFGFPRSKVLK

SEQ ID NO: 2343 - protein, 1329 aa, Homo sapiens
QGYKLIAWEPEQEEEVTMVTARPNFQDSIHVGFVSGLKKFTEYFTSVLCFTTPGDGPRSTPQLVRTHEDVPGPVGHLSFSEILDTSLKVSWQEPGEKNGILTGYRISWEEYNRTNTRVTHYLPNVTLEYRVTGLTALTTYTIEVAAMTSKGQGQVSASTISSGVPPELPGPPTNLGISNIGPRSVTLQFRPGYDGKTSISRWLVEAQVGVVGEGEEWLLIHQLSNEPDARSMEVPDLNPFTCYSFRMRQVNIVGTSPPSQPSRKIQTLQAPPDMAPANVSLRTASETSLWLRWMPLPEMEYNGNPESVGYKIKYSRSDGHGKTLSHVVQDRVERDYTIEDLEEWTEYRVQVQAFNAIGSGPWSQTVVGRTRESVPSSGPTNVSALATTSSSMLVRWSEVPEADRNGLVLGYKVMYKEKDSDTQPRFWLVEGNSSRSAQLTGLGKYVLYEVQVLAFTRIGDGSPSHPPILERTLDDVPGPPMGILFPEVRTTSVRLIWQPPAAPNGIILAYQITHRLNTTTANTATVEVLAPSARQYTATGLKPESVYLFRITAQTRKGWGEAAEALVVTTEKRDRPQPPSRPMVQQEDVRARSVLLSWEPGSDGLSPVRYYTIQTRELPSGRWALHSASVSHNASSFIVDRLKPFTSYKFRVKATNDIGDSEFSEESESLTTLQAAPDEAPTILSVTPHTTTSVLIRWQPPAEDKINGILLGFRIRYRELLYEGLRGFTLRGINNPGATWAELTYLNKHRRYEIRMSVYNAVGEGPSSPPQEVFVGEAVPTAAPRNVVVHGATATQLDVTWEPPPLDSQNGDIQGYKIYFWEAQRGNLTERVKTLFLAENSVKLKNLTGYTAYMVSVAAFNAAGDGPRSTPTQGQTQQAAPSAPSSVKFSELTTTSVNVSWEAPQFPNGILEGYRLVYEPCSPVDGVSKIVTVDVKGNSPLWLKVKDLAEGVTYRFRIRAKTFTYGPEIEANVTTGPGEGAPGPPGVPIIVRYSSAIAIHWSSGDPGKGPITRYVIEARPSDEGLWDILIKDIPKEVSSYTFSMDILKPGVSYDFRVIAVNDYGFGTPSSPSQSVPAQKANPFYEEWWFLVVIALVGLIFILLLVFVLIIRGQSKKYAKKTDSGNSAKSGALGHSEMMSLDESSFPALELNNRRLSVKNSFCRKNGLYTRSPPRPSPGSLHYSDEDVTKYNDLIPAESSSLTEKPSEISDSQGSDSEYEVDSNHQKAHSFVNHYISDPTYYNSWRRQQKGISRAQAYSYTESDSGEPDHTTVTNSTSTQQGSLFRPKASRTPTPQNPPNPPSQQSTLYRPPSSLAPGSRAPIAGFSSFV

SEQ ID NO: 2344 - protein, 897 aa, Homo sapiens
MDWQPDEQGLQQVLQLLKDSQSPNTATQRIVQDKLKQLNQFPDFNNYLIFVLTRLKSEDEPTRSLSGLILKNNVKAHYQSFPPPVADFIKQECLNNIGDASSLIRATIGILITTIASKGELQMWPELLPQLCNLLNSEDYNTCEGAFGALQKICEDSSELLDSDALNRPLNIMIPKFLQFFKHCSPKIRSHAIACVNQFIMDRAQALMDNIDTFIEHLFALAVDDDPEVRKNVCRALVMLLEVRIDRLIPHMHSIIQYMLQRTQDHDENVALEACEFWLTLAEQPICKEVLASHLVQLIPILVNGMKYSEIDIILLKGDVEEDEAVPDSEQDIKPRFHKSRTVTLPHEAERPDGSEDAEDDDDDDALSDWNLRKCSAAALDVLANVFREELLPHLLPLLKGLLFHPEWVVKESGILVLGAIAEGCMQGMVPYLPELIPHLIQCLSDKKALVRSIACWTLSRYAHWVVSQPPDMHLKPLMTELLKRILDGNKRVQEAACSAFATLEEEACTELVPYLSYILDTLVFAFGKYQHKNLLILYDAIGTLADSVGHHLNQPEYIQKLMPPLIQKWNELKDEDKDLFPLLECLSSVATALQSGFLPYCEPVYQRCVTLVQKTLAQAMMYTQHPEQYEAPDKDFMIVALDLLSGLAEGLGGHVEQLVARSNIMTLLFQCMQDSMPEVRQSSFALLGDLTKACFIHVKPCIAEFMPILGTNLNPEFISVCNNATWAIGEICMQMGAEMQPYVQMVLNNLVEIINRPNTPKTLLENTGRLTSPSAIPAITIGRLGYVCPQEVAPMLQQFIRPWCTSLRNIRDNEEKDSAFRGICMMIGVNPGGVVQDFIFFCDAVASWVSPKDDLRDMFYKILHGFKDQVGEDNWQQFSEQFPPLLKERLAAFYGV

SEQ ID NO: 2345 - protein, 445 aa, Homo sapiens
MSLVEAISLWNEGVLAADKKDWKGALDAFSAVQDPHSRICFNIGCMYTILKNMTEAEKAFTRSINRDKHLAVAYFQRGMLYYQTEKYDLAIKDLKEALIQLRGNQLIDYKILGLQFKLFACEVVASVVDQDSFSGFAPLQPQAAEPPPRPKTPEIFRALEGEAHRVLFGFVPETKEELQVMPGNIVFVLKKGNDNWATVMFNGQKGLVPCNYLEPVELRIHPQQQPQEESSPQSDIPAPPSSKAPGRPQLSPGQKQKEEPKEVKLSVPMPYTLKVHYKYTVVMKTQPGLPYSQVRDMVSKKLELRLEHTKLSYRPRDSNELVPLSEDSMKDAWGQVKNYCLTLWCENTVGDQGFPDEPKESEKADANNQTTEPQLKKGSQVEALFSYEATQPEDLEFQEGDIILVLSKVNEEWLEGECKGKVGIFPKVFVEDCATTDLESTRREV

SEQ ID NO: 2346 - protein, 407 aa, Homo sapiens
MAAVGRVGSFGSSPPGLSSTYTGGPLGNEIASGNGGAAAGDDEDGQNLWSCILSEVSTRSRSKLPAGKNVLLLVIRDFQEYVEPGEDFPASPQRRNTASQEDKDDSVVLPLGADTLTHNLGIPVLVVCTKCDAISVLEKEHDYRDEHFDFIQSHIRKFCLQYGAALIYTSVKENKNIDLVYKYIVQKLYGFPYKIPAVVVEKDAVFIPAGWDNDKKIGILHENFQTLKAEDNFEDIITKPPVRKFVHEKEIMAEDDQVFLMKLQSLLAKQPPTAAGRPVDASPRVPGGSPRTPNRSVSSNVASVSPIPAGSKKIDPNMKAGATSEGVLANFFNSLLSKKTGSPGGPGVSGGSPAGGAGGGSSGLPPSTKKSGQKPVLDVHAELDRITRKPVTVSPTTPTSPTEGEAS

SEQ ID NO: 2347 - protein, 184 aa, Homo sapiens
MNGDLELDHDAPPENHTICVKYITSFTAAFSFSLETQLTIGYGTMFPSGDCPSAIALLAIQMLLGLMLEAFITGAFVAKIARPKNRAFSIRFTDTAVVAHMDGKPNLIFQVANTRPSPLTSVRVSAVLYQERENGKLYQTSVDFHLDGISSDECPFFIFPLTYYHSITPSSPLATLLQHENPSH

SEQ ID NO: 2348 - protein, 58 aa, Homo sapiens
MEGGRRARVVIESKRNFFLGAFPTPFPAEHVELGRLGDSETAMVPGKGGADGLQQKSL

SEQ ID NO: 2349 - protein, 653 aa, Homo sapiens
SGSPLNLNSMVSNINQPLEITAISSPETSLKSSPVPYQDHDQPPVLKKERPLSQTNGAHYSPLTSDEEPGSEDEPSSARIERKIATISLESKSPPKTLENGGGLAGRKPAPAGEPVNSSKWKSTFSPISDIGLAKSADSPLQASSALSQNSLFTFRPALEEPSADAKLAAHPRKGFPGSLSGADGLSPGTNPANGCTFGGGLAADLSLHSFSDGASLPHKGPEAAGLSSPLSFPSQRGKEGSDANPFLSKRQLDGLAGLKGEGSRGKEAGEGGLPLCGPTDKTPLLSGKAAKARDREVDLKNGHNLFISAAAVPPGSLLSGPGLAPAASSAGGAASSAQTHRSFLGPFPPGPQFALGPMSLQANLGSVAGSSVLQSLFSSVPAAAGLVHVSSAATRLTNSHAMGSFSGVAGGTVGEGHRAQGHQSITFSRGGHLLGVAARALARLWELVLGVFNHAVPSASAHPFGARVGRGAACGSATLGPSPLQAAASASASSFQAPASVETRPPPPPPPPPPPLPPPAHLGRSPAGPPVLHAPPPPNAALPPPPTLLASNPEPALLQSLASLPPNQAFLPPTSAASLPPANASLSIKLTSLPHKGARPSFTVHHQPLPRLALAQAAPGIPQASATGPSAVWVSLGMPPPYAAHLSGVKPR

SEQ ID NO: 2350 - protein, 91 aa, Homo sapiens
MGETEKRIETHRIRCLSKLKMFLLAITCAFVSKTLSGSYMNSMLTQIERQFNIPTSLVGFINGSFEIGNLLLIIFVSYFGTKLHRPIMIGI

SEQ ID NO: 2351 - protein, 320 aa, Homo sapiens
MYHCHSGSKPTEKGANEYAYAKWKLCSASAICFIFMIAEVVGGHIAGSLAVVTDAAHLLIDLTSFLLSLFSLWLSSKPPSKRLTFGWHRAEILGALLSILCIWVVTGVLVYLACERLLYPDYQIQATVMIIVSSCAVAANIVLTVVLHQRCLGHNHKEVQANASVRAAFVHALGDLFQSISVLISALIIYFKPEYKIADPICTFIFSILVLASTITILKDFSILLMEGVPKSLNYSGVKELILAVDGVLSVHSLHIWSLTMNQVILSAHVATAASRDSQVVRREIAKALSKSFTMHSLTIQMESPVDQDPDCLFCEDPCD

SEQ ID NO: 2352 - protein, 49 aa, Homo sapiens
MYPNPLIYCTCWDPWNLGPRKLIKTPQLPRKNSTGSSKLTPLVPAPKNH

SEQ ID NO: 2353 - protein, 580 aa, Homo sapiens
MRALTVQRVKFAMDLPLLKRAGQDLAEKTKNFVSRSLVIGEVLSMADMATGVKCGIIYWLFGGAIRNLGSPEHVTKWFQPLQEQKYTGMFAMTERGHGSNARGIQTEATFDLSAQEFVIDTPCENAEKMYIGNAMYGNYAAVFAQLIIDGRSQGPHCFIVPVRDENGSLYPGVTAIDMMYKEGLHGVDNGILIFDKVRIPRENLLDKFGSVAPDGQYHSPIRNKSARFNAMLAALTPSRLAVAFQAMGAMKLGLTIAIRYSHSRRQFGPKTKEEVKIIEHQTQTLRLMPHLATALALTFVSRYAGALLDEDVFQGKELVNSRSLQALVAGLKAYSTWENIRCLQDCRECTGGMVVGRELLAQYTKQYEEKPLFGLLQNWAESVGDKLRTSFLAFNMDTVDDLAFLLKAVKFRERVLQRGLVARIYYKVKTKKEDFFHAWNSCLHHVASLSLAHTHRVTLEQFSLAVKSCPDQEDQTLLMKFCLLYGTKLVFQERAWYLEHKYLTPMASTRIRNQLLDLCDSVKDDARRVISTFNIPHTYLHAPIAGISNPRAAWAFYPAPLQPRPREEARSRRPKLGAKL

SEQ ID NO: 2354 - protein, 1572 aa, Homo sapiens
MLLHLCSVKNLYQNRFLGLAAMASPSRNSQSRRRCKEPLRYSYNPDQFHNMDLRGGPHDGVTIPRSTSDTDLVTSDSRSTLMVSSSYYSIGHSQDLVIHWDIKEEVDAGDWIGMYLIDEVLSENFLDYKNRGVNGSHRGQIIWKIDASSYFVEPETKICFKYYHGVSGALRATTPSVTVKNSAAPIFKSIGADETVQGQGSRRLISFSLSDFQAMGLKKGMFFNPDPYLKISIQPGKHSIFPALPHHGQERRSKIIGNTVNPIWQAEQFSFVSLPTDVLEIEVKDKFAKSRPIIKRFLGKLSMPVQRLLERHAIGDRVVSYTLGRRLPTDHVSGQLQFRFEITSSIHPDDEEISLSTEPESAQIQDSPMNNLMESGSGEPRSEAPESSESWKPEQLGEGSVPDGPGNQSIELSRPAEEAAVITEAGDQGMVSVGPEGAGELLAQVQKDIQPAPSAEELAEQLDLGEEASALLLEDGEAPASTKEEPLEEEATTQSRAGREEEEKEQEEEGDVSTLEQGEGRLQLRASVKRKSRPCSLPVSELETVIASACGDPETPRTHYIRIHTLLHSMPSAQGGSAAEEEDGAEEESTLKDSSEKDGLSEVDTVAADPSALEEDREEPEGATPGTAHPGHSGGHFPSLANGAAQDGDTHPSTGSESDSSPRQGGDHSCEGCDASCCSPSCYSSSCYSTSCYSSSCYSASCYSPSCYNGNRFASHTRFSSVDSAKISESTVFSSQDDEEEENSAFESVPDSMQSPELDPESTNGAGPWQDELAAPSGHVERSPEGLESPVAGPSNRREDWEARIDSHGRVFYVDHVNRTTTWQRPTAAATPDGMRRSGSIQQMEQLNRRYQNIQRTIATERSEEDSGSQSCEQAPAGGGGGGGSDSEAESSQSSLDLRREGSLSPVNSQKITLLLQSPAVKFITNPEFFTVLHANYSAYRVFTSSTCLKHMILKVRRDARNFERYQHNRDLVNFINMFADTRLELPRGWEIKTDQQGKSFFVDHNSRATTFIDPRIPLQNGRLPNHLTHRQHLQRLRSYSAGEASEVSRNRGASLLARPGHSLVAAIRSQHQHESLPLAYNDKIVAFLRQPNIFEMLQERQPSLARNHTLREKIHYIRTEGNHGLEKLSCDADLVILLSLFEEEIMSYVPLQAAFHPGYSFSPRCSPCSSPQNSPGLQRASARAPSPYRRDFEAKLRNFYRKLEAKGFGQGPGKIKLIIRRDHLLEGTFNQVMAYSRKELQRNKLYVTFVGEEGLDYSGPSREFFFLLSQELFNPYYGLFEYSANDTYTVQISPMSAFVENHLEWFRFSGRILGLALIHQYLLDAFFTRPFYKALLRLPCDLSDLEYLDEEFHQSLQWMKDNNITDILDLTFTVNEEVFGQVTERELKSGGANTQVTEKNKKEYIERMVKWRVERGVVQQTEALVRGFYEVVDSRLVSVFDARELELVIAGTAEIDLNDWRNNTEYRGGYHDGHLVIRWFWAAVERFNNEQRLRLLQFVTGTSSVPYEGFAALRGSNGLRRFCIEKWGKITSLPRAHTCFNRLDLPPYPSYSMLYEKLLTAVEETSTFGLE

SEQ ID NO: 2355 - protein, 436 aa, Homo sapiens
MDAMKRGLCCVLLLCGAVFVSPSQEIHARFRRGARSYQVICRDEKTQMIYQQHQSWLRPVLRSNRVEYCWCNSGRAQCHSVPVKRNSDCYFGNGSAYRGTHSLTESGASCLPWNSMILIGKVYTAQNPSAQALGLGKHNYCRNPDGDAKPWCHVLKNRRLTWEYCDVPSCSTCGLRQYSQPQFRIKGGLFADIASHPWQAAIFAKHRRSPGERFLCGGILISSCWILSAAHCFQERFPPHHLTVILGRTYRVVPGEEEQKFEVEKYIVHKEFDDDTYDNDIALLQLKSDSSRCAQESSVVRTVCLPPADLQLPDWTECELSGYGKHEALSPFYSERLKEAHVRLYPSSRCTSQHLLNRTVTDNMLCAGDTRSGGPQANLHDACQGDSGGPLVCLNDGRMTLVGIISWGLGCGQKDVPGVYTKVTNYLDWIRDNMRP

SEQ ID NO: 2356 - protein, 1032 aa, Homo sapiens
MELLPPLPQSFLLLLLLPAKPAAGEDWQCPRTPYAASRDFDVKYVVPSFSAGGLVQAMVTYEGDRNESAVFVAIRNRLHVLGPDLKSVQSLATGPAGDPGCQTCAACGPGPHGPPGDTDTKVLVLDPALPALVSCGSSLQGRCFLHDLEPQGTAVHLAAPACLFSAHHNRPDDCPDCVASPLGTRVTVVEQGQASYFYVASSLDAAVAASFSPRSVSIRRLKADASGFAPGFVALSVLPKHLVSYSIEYVHSFHTGAFVYFLTVQPASVTDDPSALHTRLARLSATEPELGDYRELVLDCRFAPKRRRRGAPEGGQPYPVLRVAHSAPVGAQLATELSIAEGQEVLFGVFVTGKDGGPGVGPNSVVCAFPIDLLDTLIDEGVERCCESPVHPGLRRGLDFFQSPSFCPNPPGLEALSPNTSCRHFPLLVSSSFSRVDLFNGLLGPVQVTALYVTRLDNVTVAHMGTMDGRILQVELVRSLNYLLYVSNFSLGDSGQPVQRDVSRLGDHLLFASGDQVFQVPIQGPGCRHFLTCGRCLRAWHFMGCGWCGNMCGQQKECPGSWQQDHCPPKLTEFHPHSGPLRGSTRLTLCGSNFYLHPSGLVPEGTHQVTVGQSPCRPLPKDSSKLRPVPRKDFVEEFECELEPLGTQAVGPTNVSLTVTNMPPGKHFRVDGTSVLRGFSFMEPVLIAVQPLFGPRAGGTCLTLEGQSLSVGTSRAVLVNGTECLLARVSEGQLLCATPPGATVASVPLSLQVGGAQVPGSWTFQYREDPVVLSISPNCGYINSHITICGQHLTSAWHLVLSFHDGLRAVESRCERQLPEQQLCRLPEYVVRDPQGWVAGNLSARGDGAAGFTLPGFRFLPPPHPPSANLVPLKPEEHAIKFEYIGLGAVADCVGINVTVGGESCQHEFRGDMVVCPLPPSLQLGQDGAPLQVCVDGECHILGRVVRPGPDGVPQSTLLGILLPLLLLVAALATALVFSYWWRRKQLAPHSLSPQHSLPLMVWIPPLVSMEHPSPIVKMNPVCHCCGKSPSS

SEQ ID NO: 2357 - protein, 337 aa, Homo sapiens
MAAPEPLRPRLCRLVRGEQGYGFHLHGEKGRRGQFIRRVEPGSPAEAAALRAGDRLVEVNGVNVEGETHHQVVQRIKAVEGQTRLLVVDQETDEELRRRQLTCTEEMAQRGLPPAHDPWEPKPDWAHTGSHSSEAGKKDVSGPLRELRPRLCHLRKGPQGYGFNLHSDKSRPGQYIRSVDPGSPAARSGLRAQDRLIEVNGQNVEGLRHAEVVASIKAREDEARLLVVDPETDEHFKRLRVTPTEEHVEGPLPSPVTNGTSPAQLNGGSACSSRSDLPGSDKDTEDGSAWKQDPFQESGLHLSPTAAEAKEKARAMRVNKRAPQMDWNRKREIFSNF

SEQ ID NO: 2358 - protein, 701 aa, Homo sapiens
MAVSAGSARTSPSSGFLMVLDIPQERGLSSLDRKYLDGLDVCRFPLLDALRPLPLDWMYLVYTIMFLGALGMMLGLCYRISCVLFLLPYWYVFLLDKTSWNNHSYLYGLLAFQLTFMDANHYWSVDGLLNAHRRNAHVPLWNYAVLRGQIFIVYFIAGVKKLDADWVEGYSMEYLSRHWLFSPFKLLLSEELTSLLVVHWGGLLLDLSAGFLLFFDVSRSIGLFFVSYFHCMNSQLFSIGMFSYVMLASSPLFCSPEWPRKLVSYCPRRLQQLLPLKAAPQPSVSCVYKRSRGKSGQKPGLRHQLGAAFTLLYLLEQLFLPYSHFLTQGYNNWTNGLYGYSWDMMVHSRSHQHVKITYRDGRTGELGYLNPGVFTQSRRWKDHADMLKQYATCLSRLLPKYNVTEPQIYFDIWVSINDRFQQRIFDPRVDIVQAAWSPFQRTSWVQPLLMDLSPWRAKLQEIKSSLDNHTEVVFIADFPGLHLENFVSEDLGNTSIQLLQGEVTVELVAEQKNQTLREGEKMQLPAGEYHKVYTTSPSPSCYMYVYVNTTELALEQDLAYLQELKEKVENGSETGPLPPELQPLLEGEVKGGPEPTPLVQTFLRRQQRLQEIERRRNTPFHERFFRFLLRKLYVFRRSFLMTCISLRNLILGRPSLEQLAQEVTYANLRPFEAVGELNPSNTDSSHSNPPESNPDPVHSEF

SEQ ID NO: 2359 - protein, 295 aa, Homo sapiens
MSRESDVEAQQSHGSSACSQPHGSVTQSQGSSSQSQGISSSSTSTMPNSSQSSHSSSGTLSSLETVSTQELYSIPEDQEPEDQEPEEPTPAPWARLWALQDGFANLETESGHVTQSDLELLLSSDPPASASQSAGIRECVNDNYWFGRDKSCEYCFDEPLLKRTDKYRTYSKKHFRIFREVGPKNSYIAYIEDHSGNGTFVNTELVGKGKRRPLNNNSEIALSLSRNKVFVFFDLTVDDQSVYPKALRDEYIMSKTLGSGACGEVKLAFERKTCKKVAIKIISKRKFAIGSAREA

SEQ ID NO: 2360 - protein, 296 aa, Homo sapiens
MPQHGPWQTRMRKISNHGSLRVAKVAYPLGLCVGVFIYVAYIKWHRATATQAFFSITRAAPGARWGQQAHSPLGTAADGHEVFYGIMFDAGSTGTRVHVFQFTRPPRETPTLTHETFKALKPGLSAYADDVEKSAQGIRELLDVAKQDIPFDFWKATPLVLKATAGLRLLPGEKAQKLLQKVKKVFKASPFLVGDDCVSIMNGTDEGVSAWITINFLTGSLKTPGGSSVGMLDLGGGSTQIAFLPRVEGTLQASPPGYLTALRMFNRTYKLYSYSYLGLGLMSARLAILGGVEGQP

SEQ ID NO: 2361 - protein, 258 aa, Homo sapiens
MMVLQVSAAPRTVALTALLMVLLTSVVQGRATPENYLFQGRQECYAFNGTQRFLERYIYNREEFARFDSDVGEFRAVTELGRPAAEYWNSQKDILEEKRAVPDRMCRHNYELGGPMTLQRRVQPRVNVSPSKKGPLQHHNLLVCHVTDFYPGSIQVRWFLNGQEETAGVVSTNLIRNGDWTFQILVMLEMTPQQGDVYTCQVEHTSLDSPVTVEWKAQSDSARSKTLTGAGGFVLGLIICGVGIFMHRRSKKVQRGSA

SEQ ID NO: 2362 - protein, 80 aa, Homo sapiens
MKKKLVVLGLLAVVLVLVIVGLCLWLPSASKEPDNHVYTRAAVAADAKQCSKIGRDALRDGGSAVDAAIAALLCVGLMNA

SEQ ID NO: 2363 - protein, 92 aa, Homo sapiens
MALWMRLLPLLALLALWGPDPAAAFVNQHLCGSHLVEALYLVCGERGFFYTPKTRREAEDLQAGELLQLDAARRQPHTRRLLHRERWNKALE

SEQ ID NO: 2364 - protein, 281 aa, Homo sapiens
MKRLVCVLLVCSSAVAQLHKDPTLDHHWHLWKKTYGKQYKEKNEEAVRRLIWEKNLKFVMLHNLEHSMGMHSYDLGMNHLGDMGSCGACWAFSAVGALEAQLKLKTGKLVSLSAQNLVDCSTEKYGNKGCNGGFMTTAFQYIIDNKGIDSDASYPYKAMDQKCQYDSKYRAATCSKYTELPYGREDVLKEAVANKGPVSVGVDARHPSFFLYRSGVYYEPSCTQNVNHGVLVVGYGDLNGKEYWLVKNSWGHNFGEEGYIRMARNKGNHCGIASFPSYPEI

SEQ ID NO: 2365 - protein, 121 aa, Homo sapiens
MGRPLLLPLLLLLQPPAFLQPGGSTGSGPSYLYGVTQPKHLSASMGGSVEIPFSFYYPWELAIVPNVRISWRRGHFHGQSFYSTRPPSIHKDYVNRLFLNWTEGQESGFLRISNLRKEDQS

SEQ ID NO: 2366 - protein, 145 aa, Homo sapiens
MHVMAASMARGGVSARVLLQAARGTWWNRPGGTSGSGEGVALGTTRKFQATGSRPAGEEDAGGPERPGDVVNVVFVDRSGQRIPVSGRVGDNVLHLAQRHGVDLEGACEASLACSTCHVYVSEDHLDLLPPPEERRTRGWAARLC

SEQ ID NO: 2367 - protein, 1721 aa, Homo sapiens
MSVSRTMEDSCELDLVYVTERIIAVSFPSTANEENFRSNLREVAQMLKSKHGGNYLLFNLSERRPDITKLHAKVLEFGWPDLHTPALEKICSICKAMDTWLNADPHNVVVLHNKGNRGRIGVVIAAYMHYSNISASADQALDRFAMKRFYEDKIVPIGQPSQRRYVHYFSGLLSGSIKMNNKPLFLHHVIMHGIPNFESKGGCRPFLRIYQAMQPVYTSGIYNIPGDSQTSVCITIEPGLLLKGDILLKCYHKKFRSPARDVIFRVQFHTCAIHDLGVVFGKEDLDDAFKDDRFPEYGKVEFVFSYGPEKIQGMEHLENGPSVSVDYNTSDPLIRWDSYDNFSGHRDDGMEEVVGHTQGPLDGSLYAKVKKKDSLHGSTGAVNATRPTLSATPNHVEHTLSVSSDSGNSTASTKTDKTDEPVPGASSATAALSPQEKRELDRLLSGFGLEREKQGAMYHTQHLRSRPAGGSAVPSSGRHVVPAQVHVNGGALASERETDILDDELPNQDGHSAGSMGTLSSLDGVTNTSEGGYPEALSPLTNGLDKSYPMEPMVNGGGYPYESASRAGPAHAGHTAPMRPSYSAQEGLAGYQREGPHPAWPQPVTTSHYAHDPSGMFRSQSFSEAEPQLPPAPVRGGSSREAVQRGLNSWQQQQQQQQQPRPPPRQQERAHLESLVASRPSPQPLAETPIPSLPEFPRAASQQEIEQSIETLNMLMLDLEPASAAAPLHKSQSVPGAWPGASPLSSQPLSGSSRQSHPLTQSRSGYIPSGHSLGTPEPAPRASLESVPPGRSYSPYDYQPCLAGPNQDFHSKSPASSSLPAFLPTTHSPPGPQQPPASLPGLTAQPLLSPKEATSDPSRTPEEEPLNLEGLVAHRVAGVQAREKQPAEPPAPLRRRAASDGQYENQSPEATSPRSPGVRSPVQCVSPELALTIALNPGGRPKEPHLHSYKEAFEEMEGTSPSSPPPSGVRSPPGLAKTPLSALGLKPHNPADILLHPTGVTRRRIQPEPRSYVESVARTAVAGPRAQDSEPKSFSAPATQAYGHEIPLRNGTLGGSFVSPSPLSTSSPILSADSTSVGSFPSGESSDQGPRTPTQPLLESGFRSGSLGQPSPSAQRNYQSSSPLPTVGSSYSSPDYSLQHFSSSPESQARAQFSVAGVHTVPGSPQARHRTVGTNTPPSPGFGWRAINPSMAAPSSPSLSHHQMMGPPGTGFHGSTVSSPQSSAATTPGSPSLCRHPAGVYQVSGLHNKVATTPGSPSLGRHPGAHQGNLASGLHSNAIASPGSPSLGRHLGGSGSVVPGSPCLDRHVAYGGYSTPEDRRPTLSRQSSASGYQAPSTPSFPVSPAYYPGLSSPATSPSPDSAAFRQGSPTPALPEKRRMSVGDRAGSLPNYATINGKVSSPVASGMSSPSGGSTVSFSHTLPDFSKYSMPDNSPETRAKVKFVQDTSKYWYKPEISREQAIALLKDQEPGAFIIRDSHSFRGAYGLAMKVSSPPPTIMQQNKKDMTHELVRHFLIETGPRGVKLKGCPNEPNFGSLSALVYQHSIIPLALPCKLVIPNRDPTDESKDSSGPANSTADLLKQGAACNVLFVNSVDMESLTGPQAISKATSETLAADPTPAATIVHFKVSAQGITLTDNQRKLFFRRHYPLNTVTFCDLDPQERKWMKTEGGAPAKLFGFVARKQGSTTDNACHLFAELDPNQPASAIVNFVSKVMLNAGQKR

SEQ ID NO: 2368 - protein, 46 aa, Homo sapiens
MSNPSAPPPYEDRNPLYPGPPPPGGYGQPSVLPGGYPAYPGYPQPG

SEQ ID NO: 2369 - protein, 98 aa, Homo sapiens
EDMRKTFREQGLRNGSSILIQDSHDDNSLLTKEEKWVTSMNEIDWLHVKNLCQLESEEKQVKISATVNTMVFDIRIKAIKELKLMKELGNHLHFLFGS

SEQ ID NO: 2370 - protein, 114 aa, Homo sapiens
MLREEATKKSKEKEPGMALPQGRLTFRDVAIEFSLEEWKCLNPAQRALYRAVMLENYRNLEFVDSSLKSMMEFSSTRHSITGEVIHTGTLQRHKSHHIGDFCFPEMKKDIHHFE

SEQ ID NO: 2371 - protein, 1032 aa, Homo sapiens
MAETNNECSIKVLCRFRPLNQAEILRGDKFIPIFQGDDSVVIGGKPYVFDRVFPPNTTQEQVYHACAMQIVKDVLAGYNGTIFAYGQTSSGKTHTMEGKLHDPQLMGIIPRIARDIFNHIYSMDENLEFHIKVSYFEIYLDKIRDLLDVTKTNLSVHEDKNRVPFVKGCTERFVSSPEEILDVIDEGKSNRHVAVTNMNEHSSRSHSIFLINIKQENMETEQKLSGKLYLVDLAGSEKVSKTGAEGAVLDEAKNINKSLSALGNVISALAEGTKSYVPYRDSKMTRILQDSLGGNCRTTMFICCSPSSYNDAETKSTLMFGQRAKTIKNTASVNLELTAEQWKKKYEKEKEKTKAQKETIAKLEAELSRWRNGENVPETERLAGEEAALGAELCEETPVNDNSSIVVRIAPEERQKYEEEIRRLYKQLDDKDDEINQQSQLIEKLKQQMLDQEELLVSTRGDNEKVQRELSHLQSENDAAKDEVKEVLQALEELAVNYDQKSQEVEEKSQQNQLLVDELSQKVATMLSLESELQRLQEVSGHQRKRIAEVLNGLMKDLSEFSVIVGNGEIKLPVEISGAIEEEFTVARLYISKIKSEVKSVVKRCRQLENLQVECHRKMEVTGRELSSCQLLISQHEAKIRSLTEYMQSVELKKRHLEESYDSLSDELAKLQAQETVHEVALKDKEPDTQDADEVKKALELQMESHREAHHRQLARLRDEINEKQKTIDELKDLNQKLQLELEKLQADYEKLKSEEHEKSTKLQELTFLYERHEQSKQDLKGLEETVARELQTLHNLRKLFVQDVTTRVKKSAEMEPEDSGGIHSQKQKISFLENNLEQLTKVHKQLVRDNADLRCELPKLEKRLRATAERVKALEGALKEAKEGAMKDKRRYQQEVDRIKEAVRYKSSGKRGHSAQIAKPVRPGHYPASSPTNPYGTRSPECISYTNSLFQNYQNLYLQATPSSTSDMYFANSCTSSGATSSGGPLASYQKANMDNGNATDINDNRSDLPCGYEAEDQAKLFPLHQETAAS

SEQ ID NO: 2372 - protein, 117 aa, Homo sapiens
MGIKTALPAAELGLYSLVLSGALAYAGRGLLEASQDGAHRKAFRESVRPGWEYIGRKMDVADFEWVMWFTSFRNVIIFALSGHVLFAKLCTMVAPKLRSWMYAVYGALAVMGTMGPW

SEQ ID NO: 2373 - protein, 244 aa, Homo sapiens
MKSYAGFLTVNKTYNSNLFFWFFPAQIQPEDAPVVLWLQGGPGGSSMFGLFVEHGPYVVTSNMTLRDRDFPWTTTLSMLYIDNPVGTGFSFTDDTHGYAVNEDDVARDLYSALIQFFQIFPEYKNNDFYVTGESYAGKYVPAIAHLIHSLNPVREVKINLNGIAIGDGYSDPESIIGGYAEFLYQIGLLDEKQKKYFQKQCHECIEHIRKQNWFEAFEILDKLLDGDLTSDPSYFQNVTGCSNY

SEQ ID NO: 2374 - protein, 468 aa, Homo sapiens
FELFKLEIRTLAQALSTVEEKKQEEAKMKKKTFKGLIRIFRKGVIAVLAANRLKILGQSCASLFTWMESFKEGIGMLVCTGEPQDKHKFPKHQKEQLRCLQALSWLTSSDLLAAIISSMAELQDVIGKADPNSRICGHLLIGAAKNSFAKLMDKISLVMECIPLHSSRSITYVEKDSLVQRLAHGLHKVNTLALKYGLRGHVPITKSTASLQKQILGFTQRLHAAEVERRSLRLEVTEFKRSVNEMKKELDKAQGLQMQLNEFKQSKLITHEKFESACEELNNALLREEQAQMLLNEQAQQLQELNYKLELHSSEEADKNQTLGEAVKSLSEAKMELRRKDQSLRQLNRHLTQLEQDKRRLEENIHDAESALRMAAKDKECVANHMRAVENTLHKVRDQISLSWSAASRNDFTLQLPKLHLETFAMEGLKGGPEVVACQVRVQWCDHSSLQSQMPGLKQSSCLSLLST

SEQ ID NO: 2375 - protein, 177 aa, Homo sapiens
MSSGLRAADFPRWKRHISEQLRRRDRLQRQAFEEIILQYNKLLEKSDLHSVLAQKLQAEKHDVPNRHEIRRRQARLQKELAEAAKEPLPVEQDDDIEVIVDETSDHTEETSPVRAISRAATKRLSQPAGGLLDSITNIFGLSESPLLGHHSSSDAARRRSVSSFPVPQDNVDTHPGS

SEQ ID NO: 2376 - protein, 294 aa, Homo sapiens
MASPGKPGADEAQEEEGELEGGSAGPRAAILEQAEELFLLCDKEAKGFITKHDLQGLQSDLPLTPEQLEAVFESLDRAHTGFLTAREFCLGLGMFVGVASAQGANPCRTPEETFESGGLDVQGTAGSLDEEEEEEERFHTVLEQLGVAPVLGKQRAVRTLWARLQRERPELLGSFEDVLIRASACLEEAARERDGLEQALRRRESEHEREVRALYEETEQLREQSRRPPSQNFARGERRSRLELELQSREQDLERAGLRQRERRGRRLQEHAERESQPATATGAAQGAEYTAAG

SEQ ID NO: 2377 - protein, 1390 aa, Homo sapiens
MDGASAEQDGLQEDRSHSGPSSLPEAPLKPPGPLVPPDQQDKVQCAEVNRASTEGESPDGPGQGGLCQNGPTPPFPDPPSSLDPTTSPVGPDASPGVAGFHDNLRKSQGTSAEGSVRKEALQSLRLSLPMQETQLCSTDSPLPLEKEEQVRLQARKWLEEQLKQYRVKRQQERSSQPATKTRLFSTLDPELMLNPENLPRASTLAMTKEYSFLRTSVPRGPKVGSLGLPAHPREKKTSKSSKIRSLADYRTEDSNAGNSGGNVPAPDSTKGSLKQNRSSAASVVSEISLSPDTDDRLENTSLAGDSVSEVDGNDSDSSSYSSASTRGTYGILSKTVGTQDTPYMVNGQEIPADTLGQFPSIKDVLQAAAAEHQDQGQEVNGEVRSRRDSICSSVSLESSAAETQEEMLQVLKEKMRLEGQLEALSLEASQALKEKAELQAQLAALSTKLQAQVECSHSSQQRQDSLSSEVDTLKQSCWDLERAMTDLQNMLEAKNASLASSNNDLQVAEEQYQRLMAKVEDMQRSMLSKDNTVHDLRQQMTALQSQLQQVQLERTTLTSKLKASQAEISSLQSVRQWYQQQLALAQEARVRLQGEMAHIQVGQMTQAGLLEHLKLENVSLSQQLTETQHRSMKEKGRIAAQLQGIEADMLDQEAAFMQIQEAKTMVEEDLQRRLEEFEGERERLQRMADSAASLEQQLEQVKLTLLQRDQQLEALQQEHLDLMKQLTLTQEALQSREQSLDALQTHYDELQARLGELQGEAASREDTICLLQNEKIILEAALQAAKSGKEELDRGARRLEEGTEETSETLEKLREELAIKSGQVEHLQQETAALKKQMQKIKEQFLQQKVMVEAYRRDATSKDQLISELKATRKRLDSELKELRQELMQVHGEKRTAEAELSRLHREVAQVRQHMADLEGHLQSAQKERDEMETHLQSLQFDKEQMVAVTEANEALKKQIEELQQEARKAITEQKQKMRRLGSDLTSAQKEMKTKHKAYENAVGILSRRLQEALAAKEAADAELGQLRAQGGSSDSSLALHERIQALEAELQAVSHSKTLLEKELQEVIALTSQELEESREKVLELEDELQESRGFRKKIKRLEESNKKLALELEHEKGKLTGLGQSNAALREHNSILETALAKREADLVQLNLQVQAVLQRKEEEDRQMKHLVQALQASLEKEKEKVNSLKEQVAAAKVEAGHNRRHFKAASLELSEVKKELQAKEHLVQKLQAEADDLQIREGKHSQEIAQFQAELAEARAQLQLLQKQLDEQLSKQPVGNQEMENLKWEVDQKEREIQSLKQQLDLTEQQGRKELEGLQQLLQNVKSELEMAQEDLSMTQKDKFMLQAKVSELKNNMKTLLQQNQQLKLDLRRGAAKTVLRPASLPG

SEQ ID NO: 2378 - protein, 136 aa, Homo sapiens
MGETEKRIETHRIRCLSKLKMFLLAITCAFVSKTLSGSYMNSMLTQIERQFNIPTSLVGFINGSFEIGNLLLIIFVSYFGTKLHRPIMIGIGCVVMGLGCFLKSLPHFLMNQYEYESTVSVSGNLSSNSFLCMENG

SEQ ID NO: 2379 - protein, 152 aa, Homo sapiens
MSRPLLITFTPATDPSDLWKDGQQQPQPEKPESTLDGAAARAFYEALIGDESSAPDSQRSQTEPARERKRKKRRIMKAPAAEAVAEGASGRHGQGRSLEAEDKMTHRILRAAQEGDLPELRRLLEPHEAGGAGGNINARDAFWWTPLMCAAR

SEQ ID NO: 2380 - protein, 391 aa, Homo sapiens
MESETEPEPVTLLVKSPNQRHRDLELSGDRGWSVGHLKAHLSRVYPERPRPEDQRLIYSGKLLLDHQCLRDLLPKQEKRHVLHLVCNVKSPSKMPEINAKVAESTEEPAGSNRGQYPEDSSSDGLRQREVLRNLSSPGWENISRPEAAQQAFQGLGPGFSGYTPYGWLQLSWFQQIYARQYYMQYLAATAASGAFVPPPSAQEIPVVSAPAPAPIHNQFPAENQPANQNAAPQVVVNPGANQNLRMNAQGGPIVEEDDEINRDWLDWTYSAATFSVFLSILYFYSSLSRFLMVMGATVVMYLHHVGWFPFRPRPVQNFPNDGPPPDVVNQDPNNNLQEGTDPETEDPNHLPPDRDVLDGEQTSPSFMSTAWLVFKTFFASLLPEGPPAIAN

SEQ ID NO: 2381 - protein, 483 aa, Homo sapiens
MPTVDDILEQVGESGWFQKQAFLILCLLSAAFAPICVGIVFLGFTPDHHCQSPGVAELSQRCGWSPAEELNYTVPGLGPAGEAFLGQCRRYEVDWNQSALSCVDPLASLATNRSHLPLGPCQDGWVYDTPGSSIVTEFNLVCADSWKLDLFQSCLNAGFLFGSLGVGYFADRFGRKLCLLGTVLVNAVSGVLMAFSPNYMSMLLFRLLQGLVSKGNWMAGYTLITEFVGSGSRRTVAIMYQMAFTVGLVALTGLAYALPHWRWLQLAVSLPTFLFLLYYWCVPESPRWLLSQKRNTEAIKIMDHIAQKNGKLPPADLKMLSLEEDVTEKLSPSFADLFRTPRLRKRTFILMYLWFTDSVLYQGLILHMGATSGNLYLDFLYSALVEIPGAFIALITIDRVGRIYPMAMSNLLAGAACLVMIFISPDLHWLNIIIMCVGRMGITIAIQMICLVNAELYPTFVRKAKPKENTIYLKVQTSEPSGT

SEQ ID NO: 2382 - protein, 162 aa, Homo sapiens
MAGPVKDREAFQRLNFLYQAAHCVLAQDPENQALARFYCYTERTIAKRLVLRRPLSSSAPRDPSVKRTLCRGCSSLLVPGLTCTQRQRRCRGQRWTVQTCLTCQRSQRFLNDPGHLLWGDRPEAQLGSQADSKPLQPLPNTAHSISDRLPEEKMQTQGSSNQ

SEQ ID NO: 2383 - protein, 754 aa, Homo sapiens
MLVAGLLLWASLLTGAWPSFPTQDHLPATPRVRLSFKELKATGTAHFFNFLLNTTDYRILLKDEDHDRMYVGSKDYVLSLDLHDINREPLIIHWAASPQRIEECVLSGKDVNGECGNFVRLIQPWNRTHLYVCGTGAYNPMCTYVNRGRRAQDYIFYLEPERLESGKGKCPYDPKLDTASALINEELYAGVYIDFMGTDAAIFRTLGKQTAMRTDQYNSRWLNDPSFIHAELIPDSAERNDDKLYFFFRERSAEAPQSPAVYARIGRICLNDDGGHCCLVNKWSTFLKARLVCSVPGEDGIETHFDELQDVFVQQTQDVRNPVIYAVFTSSGSVFRGSAVCVYSMADIRMVFNGPFAHKEGPNYQWMPFSGKMPYPRPGTCPGGTFTPSMKSTKDYPDEVINFMRSHPLMYQAVYPLQRRPLVVRTGAPYRLTTIAVDQVDAADGRYEVLFLGTDRGTVQKVIVLPKDDQELEELMLEEVEVFKDPAPVKTMTISSKRQQLYVASAVGVTHLSLHRCQAYGAACADCCLARDPYCAWDGQACSRYTASSKRRSRRQDVRHGNPIRQCRGFNSNANKNAVESVQYGVAGSAAFLECQPRSPQATVKWLFQRDPGDRRREIRAEDRFLRTEQGLLLRALQLSDRGLYSCTATENNFKHVVTRVQLHVLGRDAVHAALFPPLSMSAPPPPGAGPPTPPYQELAQLLAQPEVGLIHQYCQGYWRHVPPSPREAPGAPRSPEPQDQKKPRNRRHHPPDT

SEQ ID NO: 2384 - protein, 235 aa, Homo sapiens
SDEESIRAHVMASHHSKRRGRASSESQIFELNKHISAVECLLTYLENTVVPPLAKGLGAGVRTEADVEEEALRRKLEELTSNVSDQETSSEEEEAKDEKAEPNRDKSVGPLPQADPEVSDIESRIAALRAAGLTVKPSGKPRRKSNLPIFLPRVAGKLGKRPEDPNADPSSEAKAMAVPYLLRRKFSNSLKSQGKDDDSFDRKSVYRGSLTQRNPNARKGMASHTFAKPVVAHQS

SEQ ID NO: 2385 - protein, 97 aa, Homo sapiens
MEVTTRLTWNDENHLRKLLGNVSLSLLYKSSVHGGSIEDMVERCSRQGCTITMAYIDYNMIVAFMLGNYINLHESSTEPNDSLWFSLQKKNDTTEIE

SEQ ID NO: 2386 - protein, 779 aa, Homo sapiens
MRTLEDSSGTVLHRLIQEQLRYGNLTETRTLLAIQQQALRGGAGTGGTGSPQASLEILAPEDSQVLQQATRQEPQGQEHQGGENHLAENTLYRLCPQPSKGEELPTYEEAKAHSQYYAAQQAGTRPHAGDRDPRGAPGGSRRQDEALRELRHGHVRSLSERLLQLSLERNGARAPSHMSSSHSFPQLARNQQGPPLRGPPAEGPESRGPPPQYPHVVLAHETTTAVTDPRYRARGSPHFQHAEVRILQAQVPPVFLQQQQQYQYLQQSQEHPPPPHPAALGHGPLSSLSPPAVEGPVSAQASSATSGSAHLAQMEAVLRENARLQRDNERLQRELESSAEKAGRIEKLESEIQRLSEAHESLTRASSKREALEKTMRNKMDSEMRRLQDFNRDLRERLESANRRLASKTQEAQAGSQDMVAKLLAQSYEQQQEQEKLEREMALLRGAIEDQRRRAELLEQALGNAQGRAARAEEELRKKQAYVEKVERLQQALGQLQAACEKREQLELRLRTRLEQELKALRAQQRQAGAPGGSSGSGGSPELSALRLSEQLREKEEQILALEADMTKWEQKYLEERAMRQFAMDAAATAAAQRDTTLIRHSPQPSPSSSFNEGLLTGGHRHQEMESRLKVLHAQILEKDAVIKVLQQRSRRDPGKAIQGSLRPAKSVPSVFAAAAAGTQGWQGLSSSERQTADAPARLTTDRAPTEEPVVTAPPAAHAKHGSRDGSTQTEGPPDSTSTCLPPEPDSLLGCSSSQRAASLDSVATSRVQDLSDMVEILI

SEQ ID NO: 2387 - protein, 189 aa, Homo sapiens
MGPPSLVLCLLSATVFSLLGGSSAFLSHHRLKGRFQRDRRNIRPNIILVLTDDQDVELGSMQVMNKTRRIMEQGGAHFINAFVTTPMCCPSRSSILTGKYVHNHNTYTNNENCSSPSWQAQHESRTFAVYLNSTGYRTAFFGKYLNEYNGSYVPPGWKEWVGLLKNSRFYNYTLCRNGVKEKHGSDYSK

SEQ ID NO: 2388 - protein, 325 aa, Homo sapiens
MQETPSSANGPSREGSRLPPAREGHPVYPQLRPGYIPIPVLHEGAENRQVHPFHVYPQPGMQRFRTEAAAAAPQRSQSPLRGMPETTQPDKQCGQVAAAAAAQPPASHGPERSQSPAASDCSSSSSSASLPSSGRSSLGSHQLPRGYISIPVIHEQNVTRPAAQPSFHQAQKTHYPAQQGEYQTHQPVYHKIQGDDWEPRPLRAASPFRSSVQGASSREGSPARSSTPLHSPSPIRVHTVVDRPQPMTHRETAPVSQPENKPESKPGPVGPELPPGHIPIQVIRKEVDSKPVSQKPPPPSEKVEVKVPPAPVPCPPPSPGPSAVP

SEQ ID NO: 2389 - protein, 196 aa, Homo sapiens
SSRSNSFGERPGGGGGARRVRALVSHSEGANHTLLRFSAGDVVEVLVPEAQNGWLYGKLEGSSASGWFPEAYVKALEEGPVNPMTPVTPMTSMTSMSPMTPMNPGNELPSRSYPLRGSHSLDDLLDRPGNSIAPSEYWDGQSRSRTPSRVPSRAPSPAPPPLPSSRRSSMGSTAVATDVKGHKSFCHCQASSHHHQ

SEQ ID NO: 2390 - protein, 158 aa, Homo sapiens
MGGPVREPALSVALWLSWGAALGAVACAMALLTQQTELQSLRREVSRLQGTGGPSQNGEGYPWQSLPEQSSDALEAWENGERSRKRRAVLTQKQKKQHSVLHLVPINATSKDDSDVTEVMWQPALRRGRGLQAQGYGVRIQDAGVYLLYSQVLFQDVT

SEQ ID NO: 2391 - protein, 106 aa, Homo sapiens
MSNPSAPPPYEDRNPLYPGPPPPGGYGQPSVLPGGYPAYPGYPQPGYGHPAGYPQPMPPTHPMPMNYGPGHGYDGEERAVSDSFGPGEWDDRKVRHTFIRKVYSII

SEQ ID NO: 2392 - protein, 1911 aa, Homo sapiens [sequence omitted]

SEQ ID NO: 2393 - protein, 1334 aa, Homo sapiens
MALSPGANLVFHEDPKMTPSPPSCGAPGLGSGTIPQPHPDMAQVPMLNLLPSPGLALVPDLNDSLSPVSGEASGLVSENTPRPDDSRAIAPASLQITSSCSGEALDLDSKDVSRPDSQGRLCPASNPILSPSSTEAPRLSSGNHPQSNSEDAFKCLSSKIFKLGQRNSNPSRHELNPFIRHHSREGLVLGHCISRPSSKALLIPTSNSSLDLDSNPLLNMGSRNTSKLNLNVAPDSHGTLIPDTNETITLASHNISESVSKGAFSTTWSTSSKETMNVASSGHSRSDLSVTITQASYVTLIPGSSYGISLHSSTHEPNSTISPPSCMTLILGSNETLSLDSSLLFSDTSTLTLSSQQDDAKDNSIHTVPLEENLESWSEMASIKVGQFPLGFPISNPAGKDAVTLQGIPEGAFDEVTSCLVKVPEKTEGGNNMALVENVTTLQKSQDLLEAEGEKKTMIKKIMRQIQEEPLDSLSSSVRKQAMEILTQLSHTQPTLGMRERSELVNVCVHSVFSLPSVQAMQEKDEAKAETIQALYHQTLEALQTLLKALFIEDPTPAGLKSILEALGPWMNSGKAHERARAVNTNVSVLNHMLLTLPFFMPLGFPALGLLLGRLILHIGDPDEEIGCEALDGIIILYTILELQKRARDKEETNKKELYESNKHFLGPYNPVSPCQNILRVIEEFGDFLGPQQIKDLLLAALEGLKGSSEAPGKDSREMMQLASEVMLSSVLEWYRHRALEVIPEIMQGIYMQLSHIQEPRARQVALLPVSLLASSFMTEVVVALLMCPLPLNSNGAEMWRQLILCKPSCDVRDLLDLLLGSLKEKPVTKEGRASIVPLAAASGLCELLSVNSCMGRVRRIYPQLLLALLIQVHYHIGLNLPGCVAPPKDTKKGAQPSPFVPVRWVVKVVKTLLLRMGCSYETTFLEDQGGWELMEQVESHHRGVALLARAMVQYSCQELCRILYLLIPLLERGDEKHRITATAFFVELLQMEQVRRIPEEYSLGRMAEGLSHHDPIMKVLSIRGLVILARRSEKTAKVKALLPSMVKGLKNMDGMLVVEAVHNLKAVFKGRDQKLMDSAVYVEMLQILLPHFSDAREVVRSSCINLYGKVVQKLRAPRTQAMEEQLVSTLVPLLLTMQEGNSKVSQKCVKTLLRCSYFMAWELPKRAYSRKPWDNQQQTVAKICKCLVNTHRDSAFIFLSQSLEYAKNSRASLRKCSVMFIGSLVPCMESIMTEDRLNEVKAATPRGQRFHLLCPPLYSQPLEQAGSAERAKNLKRSPYLCRERHQKLIPGRILTWLVSSQLFLMRSVLQKNRPRPIKMRAMITLKKKTTRKL

SEQ ID NO: 2394 - protein, 414 aa, Homo sapiens
LLDASEKLKLTYEEKCEIEESQLKFLRNDLAEYQRTCEDLKEQLKHKEFLLAANTCNRVGGLCLKCAQHEAVLSQTHTNVHMQTIERLVKERDDLMSALVSVRSSLADTQQREASAYEQVKQVLQISEEANFEKTKALIQCDQLRKELERQAERLEKELASQQEKRAIEKDMMKKEITKEREYMGSKMLILSQNIAQLEAQVEKVTKEKISAINQLEEIQSQLASREMDVTKVCGEMRYQLNKTNMEKDEAEKEHREFRAKTNRDLEIKDQEIEKLRIELDESKQHLEQEQQKAALAREECLRLTELLGESEHQLHLTRSEIAQLSQEKRYTYDKLGKLQRRNEELEEQCVQHGRVHETMKQRLRQLDKHSQATAQQLVQLLSKQNQLLLERQSLSEEVDRLRTQLPSMPQSDC

SEQ ID NO: 2395 - protein, 575 aa, Homo sapiens
MSSDEEKYSLPVVQNDSSRGSSVSSNLQEEYEELLHYAIVTPNIEPCASQSSHPKGELVPDVRISTIHDILHSQGNNSEVRETAIEVGKGCDFHISSHSKTDESSPVLSPRKPSHPVMDFFSSHLLADSSSPATNSSHTDAHEILVSDFLVSDENLQKMENVLDLWSSGLKTNIISELSKWRLNFIDWHRMEMRKEKEKHAAHLKQLCNQINELKELQKTFEISIGRKDEVISSLSHAIGKQKEKIELMRTFFHWRIGHVRARQDVYEGKLADQYYQRTLLKKVWKVWRSVVQKQWKDVVERACQARAEEVCIQISNDYEAKVAMLSGALENAKAEIQRMQHEKEHFEDSMKKAFMRGVCALNLEAMTIFQNRNDAGIDSTNNKKEEYGPGVQGKEHSAHLDPSAPPMPLPVTSPLLPSPPAAVGGASATAVPSAASMTSTRAASASSVHVPVSALGAGSAATAASEEMYVPRVVTSAQQKAGRTITARITGRCDFASKNRISSSLAIMGVSPPMSSVVVEKHHPVTVQTIPQATAAKYPRTIHPESSTSASRSLGTRSAHTQSLTSVHSIKVVD

SEQ ID NO: 2396 - protein, 151 aa, Homo sapiens
MAATALLEAGLARVLFYPTLLYTLFRGKVPGRAHRDWYHRIDPTVLLGALPLRSLTRQVSRAGEPGPLPRPRRSVPVGPLGSPPSLLSHLFASAAGTGRERARGDHHERGVRDEVPVQLFTGAQMESRGGCKSHRQDPVIHPHQAWPAGCS

SEQ ID NO: 2397 - protein, 378 aa, Homo sapiens
MSKTMAMNLLEDWCRGMEVDIHRSLLVTGIPEDCGQAEIEETLNGVLSPLGPYRVLNKIFVREENVKAALIEVGEGVNLSTIPREFPGRGGVWRVVCRDPTQDAEFLKNLNEFLDAEGRTWEDVVRLLQLNHPTLSQNQHQPPENWAEALGVLLGAVVQIIFCMDAEIRSREEARAQEAAEFEEMAAWALAAGRKVKKEPGLAAEVGSALKAETPNNWNATEDQHEPTKPLVRRAGAKSRSRRKKQKKNSRQEAVPWKKPKGINSNSTANLEDPEVGDAESMAISEPIKGSRKPCVNKEELALKKPMAKCAWKGPREPPQDARAEAESPGGASESDQDGGHESPPKKKAVAWVSAKNPAPMRKKKKNPERFDLGDHPY

SEQ ID NO: 2398 - protein, 1676 aa, Homo sapiens
MFRQFYLWTCLASGIILGSLFEICLGQYDDDCKLARGGPPATIVAIDEESRNGTILVDNMLIKGTAGGPDPTIELSLKDNVDYWVLMDPVKQMLFLNSTGRVLDRDPPMNIHSIVVQVQCINKKVGTIIYHEVRIVVRDRNDNSPTFKHESYYATVNELTPVGTTIFTGFSGDNGATDIDDGPNGQIEYVIQYNPDDPTSNDTFEIPLMLTGNIVLRKRLNYEDKTRYFVIIQANDRAQNLNERRTTTTTLTVDVLDGDDLGPMFLPCVLVPNTRDCRPLTYQAAIPELRTPEELNPIIVTPPIQAIDQDRNIQPPSDRPGILYSILVGTPEDYPRFFHMHPRTAELSLLEPVNRDFHQKFDLVIKAEQDNGHPLPAFAGLHIEILDENNQSPYFTMPSYQGYILESAPVGATISDSLNLTSPLRIVALDKDIEDTKDPELHLFLNDYTSVFTVTQTGITRYLTLLQPVDREEQQTYTFSITAFDGVQESEPVIVNIQVMDANDNTPTFPEISYDVYVYTDMRPGDSVIQLTAVDADEGSNGEITYEILVGAQGDFIINKTTGLITIAPGVEMIVGRTYALTVQAADNAPPAERRNSICTVYIEVLPPNNQSPPRFPQLMYSLEISEAMRVGAVLLNLQATDREGDSITYAIENGDPQRVFNLSETTGILTLGKALDRESTDRYILIITASDGRPDGTSTATVNIVVTDVNDNAPVFDPYLPRNLSVVEEEANAFVGQVKATDPDAGINGQVHYSLGNFNNLFRITSNGSIYTAVKLNREVRDYYELVVVATDGAVHPRHSTLTLAIKVLDIDDNSPVFTNSTYTVLVEENLPAGTTILQIEAKDVDLGANVSYRIRSPEVKHFFALHPFTGELSLLRSLDYEAFPDQEASITFLVEAFDIYGTMPPGIATVTVIVKDMNDYPPVFSKRIYKGMVAPDAVKGTPITTVYAEDADPPGLPASRVRYRVDDVQFPYPASIFEVEEDSGRVITRVNLNEEPTTIFKLVVVAFDDGEPVMSSSATVKILVLHPGEIPRFTQEEYRPPPVSELATKGTMVGVISAAAINQSIVYSIVSGNEEDTFGINNITGVIYVNGPLDYETRTSYVLRVQADSLEVVLANLRVPSKSNTAKVYIEIQDENNHPPVFQKKFYIGGVSEDARMFTSVLRVKATDKDTGNYSVMAYRLIIPPIKEGKEGFVVETYTGLIKTAMLFHNMRRSYFKFQVIATDDYGKGLSGKADVLVSVVNQLDMQVIVSNVPPTLVEKKIEDLTEILDRYVQEQIPGAKVVVESIGARRHGDAFSLEDYTKCDLTVYAIDPQTNRAIDRNELFKFLDGKLLDINKDFQPYYGEGGRILEIRTPEAVTSIKKRGESLGYTEGALLALAFIIILCCIPAILVVLVSYRQVFKGRQAECTKTARIQAALPAAKPAVPAPAPVAAPPPPPPPPPGAHLYEELGDSSMYEMPQYGSRRRLLPPAGQEEYGEVVGEAEEEYEEEEWARKRMIKLVVDREYETSSTGEDSAPECQRNRLHHPSIHSNINGNIYIAQNGSVVRTRRACLTDNLKVASPVRLGGPFKKLDKLAVTHEENVPLNTLSKGPFSTEKMNARPTLVTFAPCPVGTDNTAVKPLRNRLKSTVEQESMIDSKNIKEALEFHSDHTQSDDEELWMGPWNNLHIPMTKL

SEQ ID NO: 2399 - protein, 207 aa, Homo sapiens
MSSPLASLSKTRKVPLPSEPMNPGRRGIRIYGDVPASHDSELMAFMTRKLWDLEQQVKAQTDEILSKDQKIAALEDLVQTLRPHPAEATLQRQEELETMCVQLQRQVREMERFLSDYGLQWVGEPMDQEDSESKTVSEHGERDWMTAKKFWKPGDSLAPPEVDFDRLLASLQDLSELVVEGDTQVTPVPGGARLRTLEPIPLKLYRN

SEQ ID NO: 2400 - protein, 359 aa, Homo sapiens
MRPPQCLLHTPSLASPLLLLLLWLLGGGVGAEGREDAELLVTVRGGRLRGIRLKTPGGPVSAFLGIPFAEPPMGPRRFLPPEPKQPWSGVVDATTFQSVCYQYVDTLYPGFEGTEMWNPNRELSEDCLYLNVWTPYPRPTSPTPVLVWIYGGGFYSGASSLDVYDGRFLVQAERTVLVSMNYRVGAFGFLALPGSREAPGNVGLLDQRLALQWVQENVAAFGGDPTSVTLFGESAGAASVGMHLLSPPSRGLFHRAVLQSGAPNGPWATVGMGEARRRATQLAHLVGCPPGGTGGNDTELVACLRTRPAQVLVNHEWHVLPQESVFRFSFVPVVDGDFLSDTPEALINAGDFHGLQGSQ

SEQ ID NO: 2401 - protein, 2330 aa, Homo sapiens
MLRGPGPGLLLLAVQCLGTAVPSTGASKSKRQAQQMVQPQSPVAVSQSKPGCYDNGKHYQINQQWERTYLGNALVCTCYGGSRGFNCESKPEAEETCFDKYTGNTYRVGDTYERPKDSMIWDCTCIGAGRGRISCTIANRCHEGGQSYKIGDTWRRPHETGGYMLECVCLGNGKGEWTCKPIAEKCFDHAAGTSYVVGETWEKPYQGWMMVDCTCLGEGSGRITCTSRNRCNDQDTRTSYRIGDTWSKKDNRGNLLQCICTGNGRGEWKCERHTSVQTTSSGSGPFTDVRAAVYQPQPHPQPPPYGHCVTDSGVVYSVGMQWLKTQGNKQMLCTCLGNGVSCQETAVTQTYGGNSNGEPCVLPFTYNGRTFYSCTTEGRQDGHLWCSTTSNYEQDQKYSFCTDHTVLVQTRGGNSNGALCHFPFLYNNHNYTDCTSEGRRDNMKWCGTTQNYDADQKFGFCPMAAHEEICTTNEGVMYRIGDQWDKQHDMGHMMRCTCVGNGRGEWTCIAYSQLRDQCIVDDITYNVNDTFHKRHEEGHMLNCTCFGQGRGRWKCDPVDQCQDSETGTFYQIGDSWEKYVHGVRYQCYCYGRGIGEWHCQPLQTYPSSSGPVEVFITETPSQPNSHPIQWNAPQPSHISKYILRWRPKNSVGRWKEATIPGHLNSYTIKGLKPGVVYEGQLISIQQYGHQEVTRFDFTTTSTSTPVTSNTVTGETTPFSPLVATSESVTEITASSFVVSWVSASDTVSGFRVEYELSEEGDEPQYLDLPSTATSVNIPDLLPGRKYIVNVYQISEDGEQSLILSTSQTTAPDAPPDTTVDQVDDTSIVVRWSRPQAPITGYRIVYSPSVEGSSTELNLPETANSVTLSDLQPGVQYNITIYAVEENQESTPVVIQQETTGTPRSDTVPSPRDLQFVEVTDVKVTIMWTPPESAVTGYRVDVIPVNLPGEHGQRLPISRNTFAEVTGLSPGVTYYFKVFAVSHGRESKPLTAQQTTKLDAPTNLQFVNETDSTVLVRWTPPRAQITGYRLTVGLTRRGQPRQYNVGPSVSKYPLRNLQPASEYTVSLVAIKGNQESPKATGVFTTLQPGSSIPPYNTEVTETTIVITWTPAPRIGFKLGVRPSQGGEAPREVTSDSGSIVVSGLTPGVEYVYTIQVLRDGQERDAPIVNKVVTPLSPPTNLHLEANPDTGVLTVSWERSTTPDITGYRITTTPTNGQQGNSLEEVVHADQSSCTFDNLSPGLEYNVSVYTVKDDKESVPISDTIIPAVPPPTDLRFTNIGPDTMRVTWAPPPSIDLTNFLVRYSPVKNEEDVAELSISPSDNAVVLTNLLPGTEYVVSVSSVYEQHESTPLRGRQKTGLDSPTGIDFSDITANSFTVHWIAPRATITGYRIRHHPEHFSGRPREDRVPHSRNSITLTNLTPGTEYVVSIVALNGREESPLLIGQQSTVSDVPRDLEVVAATPTSLLISWDAPAVTVRYYRITYGETGGNSPVQEFTVPGSKSTATISGLKPGVDYTITVYAVTGRGDSPASSKPISINYRTEIDKPSQMQVTDVQDNSISVKWLPSSSPVTGYRVTTTPKNGPGPTKTKTAGPDQTEMTIEGLQPTVEYVVSVYAQNPSGESQPLVQTAVTNIDRPKGLAFTDVDVDSIKIAWESPQGQVSRYRVTYSSPEDGIHELFPAPDGEEDTAELQGLRPGSEYTVSVVALHDDMESQPLIGTQSTAIPAPTDLKFTQVTPTSLSAQWTPPNVQLTGYRVRVTPKEKTGPMKEINLAPDSSSVVVSGLMVATKYEVSVYALKDTLTSRPAQGVVTTLENVSPPRRARVTDATETTITISWRTKTETITGFQVDAVPANGQTPIQRTIKPDVRSYTITGLQPGTDYKIYLYTLNDNARSSPVVIDASTAIDAPSNLRFLATTPNSLLVSWQPPRARITGYIIKYEKPGSPPREVVPRPRPGVTEATITGLEPGTEYTIYVIALKNNQKSEPLIGRKKTVQKTPFVTHPGYDTGNGIQLPGTSGQQPSVGQQMIFEEHGFRRTTPPTTATPIRHRPRPYPPNVGQEALSQTTISWAPFQDTSEYIISCHPVGTDEEPLQFRVPGTSTSATLTGLTRGATYNVIVEALKDQQRHKVREEVVTVGNSVNEGLNQPTDDSCFDPYTVSHYAVGDEWERMSESGFKLLCQCLGFGSGHFRCDSSRWCHDNGVNYKIGEKWDRQGENGQMMSCTCLGNGKGEFKCDPHEATCYDDGKTYHVGEQWQKEYLGAICSCTCFGGQRGWRCDNCRRPGGEPSPEGTTGQSYNQYSQRYHQRTNTNVNCPIECFMPLDVQADREDSRE

SEQ ID NO: 2402 - protein, 219 aa, Homo sapiens
MKVLWAALLVTFLAGCQAKVEQAVETEPEPELRQQTEWQSGQRWELALGRFWDYLRWVQTLSEQVQEELLSSQVTQELRALMDETMKELKAYKSELEEQLTPVAEETRARLSKELQAAQARLGADMEDVCGRLVQYRGEVQAMLGQSTEELRVRLASHLRKLRKRLLRDADDLQKRLAVYQAGAREGAERGLSAIRERLGPLVEQGRVRAATVGSLAGQ

SEQ ID NO: 2403 - protein, 73 aa, Homo sapiens
MDVTSQARGVGLEMYPGTAQPAAPNTTSPELNLSHPLLGTALANGTGELSEHQQYVIGLFLSCLYTIFLFPIG

SEQ ID NO: 2404 - protein, 406 aa, Homo sapiens
MDSSAAPTNASNCTDALAYSSCSPAPSPGSWVNLSHLDGNLSDPCGPNRTDLGGRDSLCPPTGSPSMITAITIMALYSIVCVVGLFGNFLVMYVIVRYTKMKTATNIYIFNLALADALATSTLPFQSVNYLMGTWPFGTILCKIVISIDYYNMFTSIFTLCTMSVDRYIAVCHPVKALDFRTPRNAKIINVCNWILSSAIGLPVMFMATTKYRQGSIDCTLTFSHPTWYWENLLKICVFIFAFIMPVLIITVCYGLMILRLKSVRMLSGSKEKDRNLRRITRMVLVVVAVFIVCWTPIHIYVIIKALVTIPETTFQTVSWHFCIALGYTNSCLNPVLYAFLDENFKRCFREFCIPTSSNIEQQNSTRIRQNTRDHPSTANTVDRTNHQKIDLFQKSSLLNCEHTKG

SEQ ID NO: 2405 - protein, 55 aa, Homo sapiens
MQPRVLLVVALLALLASARASEAEDASLLSFMQGYMKHATKTAKDALSSVQESQV

SEQ ID NO: 2406 - protein, 422 aa, Homo sapiens
MWLFFGITGLLTAALSGHPSPAPPDQLNTSSAESELWEPGERLPVRLTNGSSSCSGTVEVRLEASWEPACGALWDSRAAEAVCRALGCGGAEAASQLAPPTPELPPPPAAGNTSVAANATLAGAPALLCSGAEWRLCEVVEHACRSDGRRARVTCAENRALRLVDGGGACAGRVEMLEHGEWGSVCDDTWDLEDAHVVCRQLGCGWAVQALPGLHFTPGRGPIHRDQVNCSGAEAYLWDCPGLPGQHYCGHKEDAGAVCSASRSLHNLSTPEVPASVQTVTIESSVTVKIENKESRELMLLIPSIVLGILLLGSLIFIAFILLRIKGKYVFMLPIQVQAPPPEDSDSGSDSDYEHYDFSAQPPVALTTFYNSQRHRVTDEEVQQSRFQMPPLEEGLEELHASHIPTANPGHCITDPPSLGPQ

SEQ ID NO: 2407 - protein, 469 aa, Homo sapiens
MKWEDQNIGDQCQNAKRNLRSHTCEIKDDSQCGETFGQIPDSIVNKNTPRVNPCDSGECGEVVLGHSSLNCNIRVDTGHKSCEHQEYGEKPYTHKQRGKAISHQHSFQTHERPPTGKKPFDCKECAKTFSSLGNLRRHMAAHHGDGPYKCKLCGKAFVWPSLFHLHERTHTGEKPYECKQCSKAFPFYSSYLRHERIHTGEKAYECKQCSKAFPDYSTYLRHERTHTGEKPYKCTQCGKAFSCYYYTRLHERTHTGEQPYACKQCGKTFYHHTSFRRHMIRHTGDGPHKCKICGKGFDCPSSVRNHETTHTGEKPYECKQCGKVLSHSSSFRSHMITHTGDGPQKCKICGKAFGCPSLFQRHERTHTGEKPYQCKQCGKAFSLAGSLRRHEATHTGVKPYKCQCGKAFSDLSSFQNHETTHTGEKPYECKECGKAFSCFKYLSQHKRTHTVEKPYECKTCRKAFSHFSN

SEQ ID NO: 2408 - protein, 285 aa, Homo sapiens
MEEPQSDPSVEPPLSQETFSDLWKLLPENNVLSPLPSQAMDDLMLSPDDIEQWFTEDPGPDEAPRMPEAAPPVAPAPAAPTPAAPAPAPSWPLSSSVPSQKTYQGSYGFRLGFLHSGTAKSVTCTYSPALNKMFCQLAKTCPVQLWVDSTPPPGTRVRAMAIYKQSQHMTEVVRRCPHHERCSDSDGLAPPQHLIRVEGNLRVEYLDDRNTFRHSVVVPYEPPEVGSDCTTIHYNYMCNSSCMGGMNRRPILTIITLEDSRPRQVDHLRSGVQDSLANIAKSHLY

SEQ ID NO: 2409 - protein, 1975 aa, Homo sapiens
MWIPTEHEKYGVVIASFRGTVPYGLSLEIGDTVQILEKCDGWYRGFALKNPNIKGIFPSSYVHLKNACVKNKGQFEMVIPTEDSVITEMTSTLRDWGTMWKQLYVRNEGDLFHRLWHIMNEILDLRRQVLVGHLTHDRMKDVKRHITARLDWGNEQLGLDLVPRKEYAMVDPEDISITELYRLMEHRHRKKDTPVQASSHHLFVQMKSLMCSNLGEELEVIFSLFDSKENRPISERFFLRLNRNGLPKAPDKPERHCSLFVDLGSSELRKDIYITVHIIRIGRMGAGEKKNACSVQYRRPFGCAVLSIADLLTGETKDDLILKVYMCNTESEWYQIHENIIKKLNARYNLTGSNAGLAVSLQLLHGDIEQIRREYSSVFSHGVSITRKLGFSNIIMPGEMRNDLYITIERGEFEKGGKSVARNVEVTMFIVDSSGQTLKDFISFGSGEPPASEYHSFVLYHNNSPRWSELLKLPIPVDKFRGAHIRFEFRHCSTKEKGEKKLFGFSFVPLMQEDGRTLPDGTHELIVHKCEENTNLQDTTRYLKLPFSKGIFLGNNNQAMKATKESFCITSFLCSTKLTQNGDMLDLLKWRTHPDKITGCLSKLKEIDGSEIVKFLQDTLDTLFGILDENSQKYGSKVFDSLVHIINLLQDSKFHHFKPVMDTYIESHFAGALAYRDLIKVLKWYVDRITEAERQEHIQEVLKAQEYIFKYIVQSRRLFSLATGGQNEEEFRCCIQELLMSVRFFLSQESKGSGALSQSQAVFLSSFPAVYSELLKLFDVREVANLVQDTLGSLPTILHVDDSLQAIKLQCIGKTVESQLYTNPDSRYILLPVVLHHLHIHLQEQKDLIMCARILSNVFCLIKKNSSEKSVLEEIDVIVASLLDILLRTILEITSRPQPSSSAMRFQFQDVTGEFVACLLSLLRQMTDRHYQQLLDSFNTKEELRDFLLQIFTVFRILIRPEMFPKDWTVMRLVANNVIITTVLYLSDALRKNFLNENFDYKIWDSYFYLAVIFINQLCLQLEMFTPSKKKKVLEKYGDMRVTMGCEIFSMWQNLGEHKLHFIPALIGPFLEVTLIPQPDLRNVMIPIFHDMMDWEQRRSGNFKQVEAKLIDKLDSLMSEGKGDETYRELFNSIIPLFGPYPSLLKKIERETWRESGVSLIATVTRLMERLLDYRDCMKMGEVDGKKIGCTVSLLNFYKTELNKEEMYIRYIHKLYDLHLKAQNFTEAAYTLLLYDELLEWSDRPLREFLTYPMQTEWQRKEHLHLTIIQNFDRGKCWENGIILCRKIAEQYESYYDYRNLSKMRMMEASLYDKIMDQQRLEPEFFRVGFYGKKFPFFLRNKEFVCRGHDYERLEAFQQRMLNEFPHAIAMQHANQPDETIFQAEAQYLQIYAVTPIPESQEVLQREGVPDNIKSFYKVNHIWKFRYDRPFHKGTKDKENEFKSLWVERTSLYLVQSLPGISRWFEVEKREVVEMSPLENAIEVLENKNQQLKTLISQCQTRQMQNINPLTMCLNGVIDAAVNGGVSRYQEAFFVKEYILSHPEDGEKIARLRELMLEQAQILEFGLAVHEKFVPQDMRPLHKKLVDQFFVMKSSLGIQEFSACMQASPVHFPNGSPRVCRNSAPASVSPDGTRVIPRRSPLSYPAVNRYSSSSLSSQASAEVSNITGQSESSDEVFNMQPSPSTSSLSSTHSASPNVTSSAPSSARASPLLSDKHKHSRENSCLSPRERPCSAIYPTPVEPSQRMLFNHIGDGALPRSDPNLSAPEKAVNPTPSSWSLDSGKEAKNMSDSGKLISPPVPPRPTQTASPARHTTSVSPSPAGRSPLKGSVQSFTPSPVEYHSPGLISNSPVLSGSYSSGISSLSRCSTSETSGFENQVNEQSAPLPVPVPVPVPSYGGEEPVRKESKTPPPYSVYERTLRRPVPLPHSLSIPVTSEPPALPPKPLAARSSHLENGARRTDPGPRPRPLPRKVSQL

SEQ ID NO: 2410 - protein, 91 aa, Homo sapiens
MSNPSAPPPYEDRNPLYPGPPPPGGYGQPSVLPGGYPAYPGYPQPGYGHPAGYPQPMPPTHPMPMNYGPGHGYDGEERAVSDSFGPGEWDD

SEQ ID NO: 2411 - protein, 1266 aa, Homo sapiens
MGPLMVLFCLLFLYPGLADSAPSCPQNVNISGGTFTLSHGWAPGSLLTYSCPQGLYPSPASRLCKSSGQWQTPGATRSLSKAVCKPGHCPNPGISLGAVRTGFRFGHGDKVRYRCSSNLVLTGSSERECQGNGVWSGTEPICRQPYSYDFPEDVAPALGTSFSHMLGATNPTQKTKDHENGTGTNTYAALNSVYLMMNNQMRLLGMETMAWQEIRHAIILLTDGKSNMGGSPKTAVDHIREILNINQKRNDYLDIYAIGVGKLDVDWRELNELGSKKDGERHAFILQDTKALHQVFEHMLDVSKLTDTICGVGNMSANASDQERTPWHVTIKPKSQETCRGALISDQWVLTAAHCFRDGNDHSLWRVNVGDPKSQWGKEFLIEKAVISPGFDVFAKKNQGILEFYGDDIALLKLAQKVKMSTHARPICLPCTMEANLALRRPQGSTCRDHENELLNKQSVPAHFVALNGSKLNINLKMGVEWTSCAEVVSQEKTMFPNLTDVREVVTDQFLCSGTQEDESPCKGVTTTPWSLARPQGSCSLEGVEIKGGSFRLLQEGQALEYVCPSGFYPYPVQTRTCRSTGSWSTLKTQDQKTVRKAECRAIHCPRPHDFENGEYWPRSPYYNVSDEISFHCYDGYTLRGSANRTCQVNGRWSGQTAICDNGAGYCSNPGIPIGTRKVGSQYRLEDSVTYHCSRGLTLRGSQRRTCQEGGSWSGTEPSCQDSFMYDTPQEVAEAFLSSLTETIEGVDAEDGHGPGEQQKRKIVLDPSGSMNIYLVLDGSDSIGASNFTGAKKCLVNLIEKVASYGVKPRYGLVTYATYPKIWVKVSEADSSNADWVTKQLNEINYEDHKLKSGTNTKKALQAVYSMMSWPDDVPPEGWNRTRHVIILMTDGLHNMGGDPITVIDEIRDLLYIGKDRKNPREDYLDVYVFGVGPLVNQVNINALASKKDNEQHVFKVKDMENLEDVFYQMIDESQSLSLCGMVWEHRKGTDYHKQPWQAKISVIRPSKGHESCMGAVVSEYFVLTAAHCFTVDDKEHSIKVSVGGEKRDLEIEVVLFHPNYNINGKKEAGIPEFYDYDVALIKLKNKLKYGQTIRPICLPCTEGTTRALRLPPTTTCQQQKEELLPAQDIKALFVSEEEKKLTRKEVYIKNGDKKGSCERDAQYAPGYDKVKDISEVVTPRFLCTGGVSPYADPNTCRGDSGGPLIVHKRSRFIQVGVISWGVVDVCKNQKRQKQVPAHARDFHINLFQVLPWLKEKLQDEDLGFL

SEQ ID NO: 2412 - protein, 306 aa, Homo sapiens
MARVPLGRSLTLSPRLEHNGMTSAHHNFRLPGSRDSPASASQVAEIIDLEWYEKSEETHASQIELLETSSTQEPLNASEAFCPRDCMVPVVFPGPVSQEGCCQFTCELLKHIMYQRQQLPLPYEQLKHFYRKPSPQAEEMLKKKPRATTEVSSRKCQQALAELESVLSHLEDFFARTLVPRVLILLGGNALSPKEFYELDLSLLAPYSVDQSLSTAACLRRLFRAIFMADAFSELQAPPLMGTVVMAQGHRNCGEDWFRPKLNYRVPSRGHKLTVTLSCGRPSIRTTAWEDYIWFQAPVTFKGFRE

SEQ ID NO: 2413 - protein, 417 aa, Homo sapiens
MRLSKTLVDMDMADYSAALDPAYTTLEFENVQVLTMGNDTSPSEGTNLNAPNSLGVSALCAICGDRATGKHYGASSCDGCKGFFRRSVRKNHMYSCRFSRQCVVDKDKRNQCRYCRLKKCFRAGMKKEAVQNERDRISTRRSSYEDSSLPSINALLQAEVLSRQITSPVSGINGDIRAKKIASIADVCESMKEQLLVLVEWAKYIPAFCELPLDDQVALLRAHAGEHLLLGATKRSMVFKDVLLLGNDYIVPRHCPELAEMSRVSIRILDELVLPFQELQIDDNEYAYLKAIIFFDPDAKGLSDPGKIKRLRSQVQVSLEDYINDRQYDSRGRFGELLLLLPTLQSITWQMIEQIQFIKLFGMAKIDNLLQEMLLGGPCQAQEGRGWSGDSPGDRPHTVSSPLSSLASPLCRFGQVA

SEQ ID NO: 2414 - protein, 454 aa, Homo sapiens
MGENDPPAVEAPFSFRSLFGLDDLKISPVAPDADAVAAQILSLLPLKFFPIIVIGIIALILALAIGLGIHFDCSGKYRCRSSFKCIELIARCDGVSDCKDGEDEYRCVRVGGQNAVLQVFTAASWKTMCSDDWKGHYANVACAQLGFPSYVSSDNLRVSSLEGQFREEFVSIDHLLPDDKVTALHHSVYVREGCASGHVVTLQCTACGHRRGYSSRIVGGNMSLLSQWPWQASLQFQGYHLCGGSVITPLWIITAAHCVYDLYLPKSWTIQVGLVSLLDNPAPSHLVEKIVYHSKYKPKRLGNDIALMKLAGPLTFNEMIQPVCLPNSEENFPDGKVCWTSGWGATEDGAGDASPVLNHAAVPLISNKICNHRDVYGGIISPSMLCAGYLTGGVDSCQGDSGGPLVCQERRLWKLVGATSFGIGCAEVNKPGVYTRVTSFLDWIHEQMERDLKT

SEQ ID NO: 2415 - protein, 468 aa, Homo sapiens
MTVLEITLAVILTLLGLAILAILLTRWARCKQSEMYISRYSSEQSARLLDYEDGRGSRHAYSTQSERSKRDYTPSTNSLALSRSSIALPQGSMSSIKCLQTTEEPPSRTAGAMMQFTAPIPGATGPIKLSQKTIVQTPGPIVQYPGSNAGPPSAPRGPPMAPIIISQRTASQLAAPIIISQRTARIPQVHTMDSSGKITLTPVVILTGYMDEELAKKSCSKIQILKCGGTARSQNSREENKEALKNDIIFTNSVESLKSAHIKEPEREGKGTDLEKDKIGMEVKVDSDAGIPKRQETQLKISEMSIPQGQGAQIKKSVSDVPRGQESQVKKSESGVPKGQEAQVTKSGLVVLKGQEAQVEKSEMGVPRRQESQVKKSQSGVSKGQEAQVKKRESVVLKGQEAQVEKSELKVPKGQEGQVEKTEADVPKEQEVQEKKSEAGVLKGPESQVKNTECFRNKDTLIYHHPEA

SEQ ID NO: 2416 - protein, 405 aa, Homo sapiens
MGSPAHRPALLLLLPPLLLLLLLRVPPSRSFPGSGDSPLEDDEVGYSHPRYKDTPWCSPIKVKYGDVYCRAPQGGYYKTALGTRCDIRCQKGYELHGSSLLICQSNKRWSDKVICKHMEPPRIKCPSVKERIAEPNKLTVRVSWETPEGRDTADGILTDVILKGLPPGSNFPEGDHKIQYTVYDRAENKGTCKFRVKVRVKRCGKLNAPENGYMKCSSDGDNYGATCEFSCIGGYELQGSPARVCQSNLAWSGTEPTCAAMNVNVGVRTAAALLDQFYEKRRLLIVSTPTARNLLYRLQLGMLQQAQCGLDLRHITVVELVGVFPTLIGRIGAKIMPPALALQLRLLLRIPLYSFSMVLVDKHGMDKERYVSLVMPVALFNLIDTFPLRKEEMVLQAEMSQTCNT

SEQ ID NO: 2417 - protein, 175 aa, Homo sapiens
SSTKPAAGGTAPLPPWKSPSSSQPLPQVPAPAQSQTQFHVQPQPQPKPQVQLHVQSQTQPVSLANTQPRGPPASSPAPAPKFSPVTPKFTPVASKFSPGAPGGSGSQPNQKLGHPEALSAGTGSPQPPSFTYAQQREKPRVQEKQHPVPPPAQNQNQGLLSSRQAGCAPLGPQGP

SEQ ID NO: 2418 - protein, 403 aa, Homo sapiens
MPSAEAKLKKNRCANCFDCPGCMHTLSTRATSISTQLPDDPAKTTMKKAYYLACGFCRWTSRDVGMADKSVASGGWQEPENPHTQRMNKLIEYYQQLAQKEKVERDRKKLARRRNYMPLAFSDKYGLGTRLQRPRAGASISTLAGLSLKEGEDQKEIKIEPAQAVDEVEPLPEDYYTRPVNLTEVTTLQQRLLQPDFQPVCASQLYPRHKHLLIKRSLRCRKCEHNLSKPEFNPTSIKFKIQLVAVNYIPEVRIMSIPNLRYMKESQVLLTLTNPVENLTHVTLFECEEGDPDDINSTAKVVVPPKELVLAGKDAAAEYDELAEPQDFQDDPDIIAFRKANKVGIFIKVTPQREEGEVTVCFKMKHDFKNLAAPIRPIEESDQGTEVIWLTQHVELSLGPLLP

SEQ ID NO: 2419 - protein, 216 aa, Homo sapiens
MLPQIPFLLLVSLNLVHGVFYAERYQMPTGIKGPLPNTKTQFFIPYTIKSKGIAVRGEQGTPGPPGPAGPRGHPGPSGPPGKPGYGSPGLQGEPGLPGPPGPSAVGKPGVPGLPGKPGERGPYGPKGDVGPAGLPGPRGPPGPPGIPGPAGISVPGKPGQQGPTGAPGPRGFPGEKGAPGVPGMNGQKGEMGYGAPGRPGERGLPGPQGPTGPSGP

SEQ ID NO: 2420 - protein, 110 aa, Homo sapiens
MDSHSGEPALLPCGTCDMVFRSSALLATHTQRFCIGHPTQEMTFGAQASVATEPQRAAVSSTSSLEASFLTPAVGFADPPPRTEEPLSGVKDRDEGLGPHHSSDLPPVSF

SEQ ID NO: 2421 - protein, 276 aa, Homo sapiens
MEVMNLMEQPIKVTEWQQTYTYDSGIHSGANTCVPSVSSKGIMEEDEACGRQYTLKKTTTYTQGVPPSQGDLEYQMSTTARAKRVREAMCPGVSGEDSSLLLATQVEGQATNLQRLAEPSQLLKSAIVHLINYQDDAELATRALPELTKLLNDEDPVVVTKAAMIVNQLSKKEASRRALMGSPQLVAAVVRTMQNTSDLDTARCTTSILHNLSHHREGLLAIFKSGGIPALVRMLSSPVESVLFYAITTLHNLLLYQEGAKMAVRLADGLQKMVPL

SEQ ID NO: 2422 - protein, 1731 aa, Homo sapiens
MELSCSEAPLYGQMMIYAKFDKNVYLPEDAEFYFTYDGSHQRHVMIAERIEDNVLQSSVPGHGLQETVTVSVCLCSEGYSPVTMGSGSVTYVDNMACRLARLLVTQANRLTACSHQTLLTPFALTAGALPALDEELVLALTHLELPLEWTVLGSSSLEVSSHRESLLHLAMRWGLAKLSQFFLCLPGGVQALALPNEEGATPLDLALREGHSKLVEDVTNFQGRWSPSFSRVQLSEEASLHYIHSSETLTLTLNHTAEHLLEADIKLFRKYFWDRAFLVKAFEPEARPEERTAMPSSGAETEEEIKNSVSSRSAAEKEDIKRVKSLVVQHNEHEDQHSLDLDRSFDILKKSKPPSTLLAAGRLSDMLNGGDEVYANCMVIDQVGDLDISYINIEGITATTSPESRGCTLWPQSSKHTLPTETSPSVYPLSENVEGTAHTEAQQSFMSPSSSCASNLNLSFGWHGFEKEQSHLKKRSSSLDALDADSEGEGHSEPSHICYTPGSQSSSRTGIPSGDELDSFETNTEPDFNISRAESLPLSSNLQSKESLLSGVRSRSYSCSSPKISLGKTRLVRELTVCSSSEEQRAYSLSEPPRENRIQEEEWDKYIIPAKSESEKYKVSRTFSFLMNRMTSPRNKSKTKSKDAKDKEKLNRHQFAPGTFSGVLQCLVCDKTLLGKESLQCSNCNANVHKGCKDAAPACTKKFQEKYNKNKPQTILGNSSFRDIPQPGLSLHPSSSVPVGLPTGRRETVGQVHPLSRSVPGTTLESFRRSATSLESESDHNSCRSRSHSDELLQSMGSSPSTESFIMEDVVDSSLWSDLSSDAQEFEAESWSLVVDPSFCNRQEKDVIKRQDVIFELMQTEMHHIQTLFIMSEIFRKGMKEELQLDHSTVDKIFPCLDELLEIHRHFFYSMKERRQESCAGSDRNFVIDRIGDILVQQFSEENASKMKKIYGEFCCHHKEAVNLFKELQQNKKFQNFIKLRNSNLLARRRGIPECILLVTQRITKYPVLVERILQYTKERTEEHKDLRKALCLIKDMIATVDLKVNEYEKNQKWLEILNKIENKTYTKLKNGHVFRKQALMSEERTLLYDGLVYWKTATGRFKDILALLLTDVLLFLQEKDQKYIFAAVDQKPSVISLQKLIAREVANEERGMFLISASSAGPEMYEIHTNSKEERNNWMRRIQQAVESCPEEKGGRTSESDEDKRKAEARVAKIQQCQEILTNQDQQICAYLEEKLHIYAELGELSGFEDVHLEPHLLIKPDPGEPPQAASLLAAALKEAESLQVAVKASQMGAVSQSCEDSCGDSVLADTLSSHDVPGSPTASLVTGGREGRGCSDVDPGIQGVVTDLAVSDAGEKVECRNFPGSSQSEIIQAIQNLTRLLYSLQAALTIQDSHIEIHRLVLQQQEGLSLGHSILRGGPLQDQKSRDADRQHEELANVHQLQHQLQQEQRRWLRRCEQQQRAQATRESWLQERERECQSQEELLLRSRGELDLQLQEYQHSLERLREGQRLVEREQARMRAQQSLLGHWKHGRQRSLPAVLLPGGPEVMELNRSESLCHENSFFINEALVQMSFNTFNKLNPSVIHQDATYPTTQSHSDLVRTSEHQVDLKVDPSQPSNVSHKLWTAAGSGHQILPFHESSKDSCKNGSSMTKCSCTLTSPPGLWTGTTSTLKDLDTSHTESPTPHDSNSHRPQLQAFITEAKLNLPTRTMTRQDGETGDGAKENIVYL

SEQ ID NO: 2423 - protein, 422 aa, Homo sapiens
MAIAQLATEYVFSDFLLKEPTEPKFKGLRLELAVDKMVTCIAVGLPLLLISLAFAQEISIGTQISCFSPSSFSWRQAAFVDSYCWAAVQQKNSLQSESGNLPLWLHKFFPYILLLFAILLYLPPLFWRFAAAPHICSDLKFIMEELDKVYNRAIKAAKSARDLDMRDGACSVPGVTENLGQSLWEVSESHFKYPIVEQYLKTKKNSNNLIIKYISCRLLTLIIILLACIYLGYYFSLSSLSDEFVCSIKSGILRNDSTVPDQFQCKLIAVGIFQLLSVINLVVYVLLAPVVVYTLFVPFRQKTDVLKVYEILPTFDVLHFKSEGYNDLSLYNLFLEENISEVKSYKCLKVLENIKSSGQGIDPMLLLTNLGMIKMDVVDGKTPMSAEMREEQGNQTAELQDSETKANNGEKNARQRLLDSSC

SEQ ID NO: 2424 - protein, 188 aa, Homo sapiens
MSEARRDSTSSLQRKKPPWLKLDIPSAVPLTAEEPSFLQPLRRQAFLRSVSMPAETAHISSPHHELRRPVLQRQTSITQTIRRGTADWFGVSKDSDSTQKWQRKSIRHCSQRYGKLKPQVLRELDLPSQDNVSLTSTETPPPLYVGPCQLGMQKLPLRFPPAPAAAQARVGGQDELPGGRSADERPLR

SEQ ID NO: 2425 - protein, 249 aa, Homo sapiens
MANLGCWMLVLFVATWSDLGLCKKRPKPGGWNTGGSRYPGQGSPGGNRYPPQGGGGWGQPHGGGWGQPHGGGWGQPHGGGWGQPHGGGWGQGGGTHSQWNKPSKPKTNMKHMAGAAAAGAVVGGLGGYMLGSAMSRPIIHFGSDYEDRYYRENMHRYPNQVYYRPMDEYSNQNNFVHDCVNITIKQHTVTTTTKGENFTETDVKMMERVVEQMCITQYERESQAYYQRGSSMVLFSSPPVILLISFLIF

SEQ ID NO: 2426 - protein, 241 aa, Homo sapiens
WSGSFPLENTELANVGANQVTVRKGEKDHTTHCHASDHANQLSIHIPGWSYRAGDYTCCDLVVKIKECKKSEDPTTPEPSPAAPSPAPRDGAGSPGLSEDCSESQQTPARSLTLQEALEVRKPQFISRSQERLKKLEHMVQQRKAQRKEDLRQKQSLLPIRTSKKQFTIPHPLSDNLFKPKERCISEKEMHMRSKRIYDNLPEVKKKKEEQRKRVILQSNRLRAEVFKKQLLDQLLQRNAV

SEQ ID NO: 2427 - protein, 147 aa, Homo sapiens
MTENTHFDKIPESCALKSWRHPGLHHGEAALRGEPRIQTLPVASALSSHRTGPPPISPSKRKFSMEPGDEDLDCDNDHVSKMSRIFNPHLNKTANGDCRRDPRERSRSPIERAVAPTMSLHGSHLYTSLPSLGLEQPLALTKNSLDA

SEQ ID NO: 2428 - protein, 172 aa, Homo sapiens
MGNGESQLSSVPAQKLGWFIQEYLKPYEECQTLIDEMVNTICDVLQEPEQFPLVQGVAIGGSYGRKTVLRGNSDGTLVLFFSDLKQFQDQKRSQRDILDKTGDKLKFCLFTKWLKNNFEIQKSLDGFTIQVFTKNQRISFEVLAAFNALSKHCWVSGEKSQRSGCQTALCNL

SEQ ID NO: 2429 - protein, 340 aa, Homo sapiens
MLSGSRAVPTPHRGSEELLKYMLHSPCVSLTMNGTYNTCGSSDLTWPPAIKLGFYAYLGVLLVLGLLLNSLALWVFCCRMQQWTETRIYMTNLAVADLCLLCTLPFVLHSLRDTSDTPLCQLSQGIYLTNRYMSISLVTAIAVDRYVAVRHPLRARGLRSPRQAAAVCAVLWVLVIGSLVARWLLGIQEGGFCFRSTRHNFNSMAFPLLGFYLPLAVVVFCSLKVVTALAQRPPTDVGQAEATRKAARMVWANLLVFVVCFLPLHVGLTVRLAVGWNACALLETIRRALYITSKLSDANCCLDAICYYYMAKEFQEASALAVAPSAKAHKSQDSLCVTLA

SEQ ID NO: 2430 - protein, 573 aa, Homo sapiens
MSMPLHQISAIPSQDAISARVYRSKTKEKEREEQNEKTLGHFMSHSSNISKAGSPPSASAPAPVSSFSRTSITPSSQDICSSSAVFSECCHHSSVQSAVVSKAPHCQSSLTQGLTVTVICKDTLQASKRNSFGSEWAQALKPAKNTKARRTLKFSRSLNDVGEKAQDTSESFAYVERTCSEGKLILPQDTCLRTNRFHHKEKRTLNHKPLGNSKHSCVSCLSAGRSTASEVEAGKGGRPGLLLEEKADGEATSRSRQLLQYLFSLSHGLSASSLHRFHELESCAARLHTAKSSSGLAGSMGFCSDEMGDDDVFEDSTSAKLKSRVLRAPLCSTEKDSDLDCPSPFSEKLPPISPVSTSGDVCRICHCEGDDESPLITPCHCTGSLHFVHQACLQQWIKSSDTRCCELCKYEFIMETKLKPLRKWEKLQMTSSERRKIMCSVTFHVIAITCVVWSLYVLIDRTAEEIKQGQATGILEWPFWTKLVVVAIGFTGGLLFMYVQCKVYVQLWKRLKAYNRVIYVQNCPETSKKNIFEKSPLTEPNFENKHGYGICHSDTNSSCCTEPEDTGAEIIHV

SEQ ID NO: 2431 - protein, 581 aa, Homo sapiens
MNRKDSKRKSHQECTGKIGGRGRPRQVRRHKTCPSPREISKVMASMNLGLLSEGGCSEDELLEKCIQSFDSAGSLCHEDHMLNMVLAMHSWVLPSADLAARLLTSYQKATGDTQELRRLQICHLVRYWLMRHPEVMHQDPQLEEVIGRFWATVAREGNSAQRRLGDSSDLLSPGGPGPPLPMSSPGLGKKRKVSLLFDHLETGELAQHLTYLEFRSFQAITPQDLRSYVLQGSVRGCPALEGSVGLSNSVSRWVQVMVLSRPGPLQRAQVLDKFIHVAQRLHQLQNFNTLMAVTGGLCHSAISRLKDSHAHLSPDSTKLSLDLFYTEDEIYELSYAREPRCPKSLPPSPFNAPLVVEWAPGVTPKPDRVTLGRHVEQLVESVFKNYDPEGRGTISQEDFERLSGNFPFACHGLHPPPRQGRGSFSREELTGYLLRASAICSKLGLAFLHTFHEVTFRKPTFCDSCSGFLWGVTKQGYRCRECGLCCHKHCRDQVKVECKKRPGAKGDAGPPGAPVPSTPAPHASCGSEENHSYTLSLEPETGCQLRHAWTQTESPHPSWETDTVPCPVMDPPSTASSKLDS

SEQ ID NO: 2432 - protein, 392 aa, Homo sapiens
MDSSAAPTNASNCTDALAYSSCSPAPSPGSWVNLSHLDGNLSDPCGPNRTDLGGRDSLCPPTGSPSMITAITIMALYSIVCVVGLFGNFLVMYVIVRYTKMKTATNIYIFNLALADALATSTLPFQSVNYLMGTWPFGTILCKIVISIDYYNMFTSIFTLCTMSVDRYIAVCHPVKALDFRTPRNAKIINVCNWILSSAIGLPVMFMATTKYRQGSIDCTLTFSHPTWYWENLLKICVFIFAFIMPVLIITVCYGLMILRLKSVRMLSGSKEKDRNLRRITRMVLVVVAVFIVCWTPIHIYVIIKALVTIPETTFQTVSWHFCIALGYTNSCLNPVLYAFLDENFKRCFREFCIPTSSNIEQQNSTRIRQNTRDHPSTANTVDRTNHQVRSL

SEQ ID NO: 2433 - protein, 1170 aa, Homo sapiens
MSLLNPVLLPPKVKAYLSQGERFIKWDDETTVASPVILRVDPKGYYLYWTYQSKEMEFLDITSIRDTRFGKFAKMPKSQKLRDVFNMDFPDNSFLLKTLTVVSGPDMVDLTFHNFVSYKENVGKAWAEDVLALVKHPLTANASRSTFLDKILVKLKMQLNSEGKIPVKNFFQMFPADRKRVEAALSACHLPKGKNDAINPEDFPEPVYKSFLMSLCPRPEIDEIFTSYHAKAKPYMTKEHLTKFINQKQRDSRLNSLLFPPARPDQVQGLIDKYEPSGINAQRGQLSPEGMVWFLCGPENSVLAQDKLLLHHDMTQPLNHYFINSSHNTYLTAGQFSGLSSAEMYRQVLLSGCRCVELDCWKGKPPDEEPIITHGFTMTTDIFFKEAIEAIAESAFKTSPYPIILSFENHVDSPRQQAKMAEYCRTIFGDMLLTEPLEKFPLKPGVPLPSPEDLRGKILIKNKKNQFSGPTSSSKDTGGEAEGSSPPSAPAGEGTVWAGEEGTELEEEEVEEEEEEESGNLDEEEIKKMQSDEGTAGLEVTAYEEMSSLVNYIQPTKFVSFEFSAQKNRSYVISSFTELKAYDLLSKASVQFVDYNKRQMSRIYPKGTRMDSSNYMPQMFWNAGCQMVALNFQTMDLPMQQNMAVFEFNGQSGYLLKHEFMRRPDKQFNPFSVDRIDVVVATTLSITVISGQFLSERSVRTYVEVELFGLPGDPKRRYRTKLSPSTNSINPVWKEEPFVFEKILMPELASLRVAVMEEGNKFLGHRIIPINALNSGYHHLCLHSESNMPLTMPALFIFLEMKDYIPGAWADLTVALANPIKFFSAHDTKSVKLKEAMGGLPEKPFPLASPVASQVNGALAPTSNGSPEPRTASLEELRELKGVVKLQRRHEKELRELERRGARRWEELLQRGAAQLAELGPPGVGGVGACKLGPGKGSRKKRSLPREESAGAAPGEGPEGVDGRVRELKDRLELELLRQGEEQYECVLKRKEQHVAEQISKMMELAREKQAAELKALKETSENDTKEMKKKLETKRLERIQGMTKVTTDKMAQERLKREINNSHIQEVVQVIKQMTENLERHQEKLEEKQAACLEQIREMEKQFQKEALAEYEARMKGLEAEVKESVRACLRTCFPSEAKDKPERACECPPELCEQDPLIAKADAQESRL

SEQ ID NO: 2434 - protein, 464 aa, Homo sapiens
MRLSKTLVDMDMADYSAALDPAYTTLEFENVQVLTMGNDTSPSEGTNLNAPNSLGVSALCAICGDRATGKHYGASSCDGCKGFFRRSVRKNHMYSCRFSRQCVVDKDKRNQCRYCRLKKCFRAGMKKEAVQNERDRISTRRSSYEDSSLPSINALLQAEVLSRQITSPVSGINGDIRAKKIASIADVCESMKEQLLVLVEWAKYIPAFCELPLDDQVALLRAHAGEHLLLGATKRSMVFKDVLLLGNDYIVPRHCPELAEMSRVSIRILDELVLPFQELQIDDNEYAYLKAIIFFDPDAKGLSDPGKIKRLRSQVQVSLEDYINDRQYDSRGRFGELLLLLPTLQSITWQMIEQIQFIKLFGMAKIDNLLQEMLLGGSPSDAPHAHHPLHPHLMQEHMGTNVIVANTMPTHLSNGQMSTPETPQPSPPGGSGSEPYKLLPGAVATIVKPLSAIPQPTITKQEVI

SEQ ID NO: 2435 - protein, 228 aa, Homo sapiens
MMCQSEARQGPELRAAKWLHFPQLALRRRLGQLSCMSRPALKLRSWPLTVLYYLLPFGALRPLSRVGWRPVSRVALYKSVPTRLLSRAWGRLNQVELPHWLRRPVYSLYIWTFGVNMKEAAVEDLHHYRNLSEFFRRKLKPQARPVCGLHSVISPSDGRILNFGQVKNCEVEQVKGVTYSLESFLGPRMCTEDLPFPPAASCDSFKNQLVTREGNELYHCVIYLAPGD

SEQ ID NO: 2436 - protein, 1705 aa, Homo sapiens
MELSCSEAPLYGQMMIYAKFDKNVYLPEDAEFYFTYDGSHQRHVMIAERIEDNVLQSSVPGHGLQETVTVSVCLCSEGYSPVTMGSGSVTYVDNMACRLARLLVTQANRLTACSHQTLLTPFALTAGALPALDEELVLALTHLELPLEWTVLGSSSLEVSSHRESLLHLAMRWGLAKLSQFFLCLPGGVQALALPNEEGATPLDLALREGHSKLVEDVTNFQGRWSPSFSRVQLSEEASLHYIHSSETLTLTLNHTAEHLLEADIKLFRKYFWDRAFLVKAFEPEARPEERTAMPSSGAETEEEIKNSVSSRSAAEKEDIKRVKSLVVQHNEHEDQHSLDLDRSFDILKKSKPPSTLLAAGRLSDMLNGGDEVYANCMVIDQVGDLDISYINIEGITATTSPESRGCTLWPQSSKHTLPTETSPSVYPLSENVEGTAHTEAQQSFMSPSSSCASNLNLSFGWHGFEKEQSHLKKRSSSLDALDADSEGEGHSEPSHICYTPGSQSSSRTGIPSGDELDSFETNTEPDFNISRAESLPLSSNLQSKESLLSGVRSRSYSCSSPKISLGKTRLVRELTVCSSSEEQRAYSLSEPPRENRIQEEEWDKYIIPAKSESEKYKVSRTFSFLMNRMTSPRNKSKTKSKDAKDKEKLNRHQFAPGTFSGVLQCLVCDKTLLGKESLQCSNCNANVHKGCKDAAPACTKKFQEKYNKNKPQTILGNSSFRDIPQPGLSLHPSSSVPVGLPTGRRETVGQVHPLSRSVPGTTLESFRRSATSLESESDHNSCRSRSHSDELLQSMGSSPSTESFIMEDVVDSSLWSDLSSDAQEFEAESWSLVVDPSFCNRQEKDVIKRQDVIFELMQTEMHHIQTLFIMSEIFRKGMKEELQLDHSTVDKIFPCLDELLEIHRHFFYSMKERRQESCAGSDRNFVIDRIGDILVQQFSEENASKMKKIYGEFCCHHKEAVNLFKELQQNKKFQNFIKLRNSNLLARRRGIPECILLVTQRITKYPVLVERILQYTKERTEEHKDLRKALCLIKDMIATVDLKVNEYEKNQKWLEILNKIENKTYTKLKNGHVFRKQALMSEERTLLYDGLVYWKTATGRFKDILALLLTDVLLFLQEKDQKYIFAAVDQKPSVISLQKLIAREVANEERGMFLISASSAGPEMYEIHTNSKEERNNWMRRIQQAVESCPEEKGGRTSESDEDKRKAEARVAKIQQCQEILTNQDQQICAYLEEKLHIYAELGELSGFEDVHLEPHLLIKPDPGEPPQAASLLAAALKEAESLQVAVKASQMGAVSQSCEDSCGDSVLADTLSSHDVPGSPTASLVTGGREGRGCSDVDPGIQGVVTDLAVSDAGEKVECRNFPGSSQSEIIQAIQNLTRLLYSLQAALTIQDSHIEIHRLVLQQQEGLSLGHSILRGGPLQDQKSRDADRQHEELANVHQLQHQLQQEQRRWLRRCEQQQRAQATRESWLQERERECQSQEELLLRSRGELDLQLQEYQHSLERLREGQRLVEREQARMRAQQSLLGHWKHGRQRSLPAVLLPGGPEVMELNRSESLCHENSFFINEALVQMSFNTFNKLNPSVIHQDATYPTTQSHSDLVRTSEHQVDLKVDPSQPSNVSHKLWTAAGSGHQILPFHESSKDSCKNDLDTSHTESPTPHDSNSHRPQLQAFITEAKLNLPTRTMTRQDGETGDGAKENIVYL

SEQ ID NO: 2437 - protein, 580 aa, Homo sapiens
MENFILYEEIGRGSKTVVYKGRRKGTINFVAILCTDKCKRPEITNWVRLTREIKHKNIVTFHEWYETSNHLWLVVELCTGGSLKTVIAQDENLPEDVVREFGIDLISGLHHLHKLGILFCDISPRKILLEGPGTLKFSNFCLAKVEGENLEEFFALVAAEEGGGDNGENVLKKSMKSRVKGSPVYTAPEVVRGADFSISSDLWSLGCLLYEMFSGKPPFFSESISELTEKILCEDPLPPIPKDSSRPKASSDFINLLDGLLQRDPQKRLTWTRLLQHSFWKKAFAGADQESSVEDLSLSRNTMECSGPQDSKELLQNSQSRQAKGHKSGQPLGHSFRLENPTEFRPKSTLEGQLNESMFLLSSRPTPRTSTAVEVSPGEDMTHCSPQKTSPLTKITSGHLSQQDLESQMRELIYTDSDLVVTPIIDNPKIMKQPPVKFDAKILHLPTYSVDKLLFLKDQDWNDFLQQVCSQIDSTEKSMGASRAKLNLLCYLCVVAGHQEVATRLLHSPLFQLLIQHLRIAPNWDIRAKVAHVIGLLASHTAELQENTPVVETTSSIGIGILNCLVQHSTPVPRQCLVYV

SEQ ID NO: 2438 - protein, 913 aa, Homo sapiens
MVQLRKLLRVLTLMKFPCCVLEVLLCALAAAARGQEMYAPHSIRIEGDVTLGGLFPVHAKGPSGVPCGDIKRENGIHRLEAMLYALDQINSDPNLLPNVTLGARILDTCSRDTYALEQSLTFVQALIQKDTSDVRCTNGEPPVFVKPEKVVGVIGASGSSVSIMVANILRLFQIPQISYASTAPELSDDRRYDFFSRVVPPDSFQAQAMVDIVKALGWNYVSTLASEGSYGEKGVESFTQISKEAGGLCIAQSVRIPQERKDRTIDFDRIIKQLLDTPNSRAVVIFANDEDIKQILAAAKRADQVGHFLWVGSDSWGSKINPLHQHEDIAEGAITIQPKRATVEGFDAYFTSRTLENNRRNVWFAEYWEENFNCKLTISGSKKEDTDRKCTGQERIGKDSNYEQEGKVQFVIDAVYAMAHALHHMNKDLCADYRGVCPEMEQAGGKKLLKYIRNVNFNGSAGTPVMFNKNGDAPGRYDIFQYQTTNTSNPGYRLIGQWTDELQLNIEDMQWGKGVREIPASVCTLPCKPGQRKKTQKGTPCCWTCEPCDGYQYQFDEMTCQHCPYDQRPNENRTGCQDIPIIKLEWHSPWAVIPVFLAMLGIIATIFVMATFIRYNDTPIVRASGRELSYVLLTGIFLCYIITFLMIAKPDVAVCSFRRVFLGLGMCISYAALLTKTNRIYRIFEQGKKSVTAPRLISPTSQLAITSSLISVQLLGVFIWFGVDPPNIIIDYDEHKTMNPEQARGVLKCDITDLQIICSLGYSILLMVTCTVYAIKTRGVPENFNEAKPIGFTMYTTCIVWLAFIPIFFGTAQSAEKLYIQTTTLTISMNLSASVALGMLYMPKVYIIIFHPELNVQKRKRSFKAVVTAATMSSRLSHKPSDRPNGEAKTELCENVDPNNFFFWLYSGTWITL

SEQ ID NO: 2439 - protein, 148 aa, Homo sapiens
MILFKQATYFISLFATVSCGCLTQLYENAFFRGGDVASMYTPNAQYCQMRCTFHPRCLLFSFLPASSINDMEKRFGCFLKDSVTGTLPKVHRTGAVSGHSLKQCGHQISACHRDIYKGVDMRGVNFNVSKVSSVEECQKRCTSNIRCQ

SEQ ID NO: 2440 - protein, 360 aa, Homo sapiens
TSTSRETQMTPLSLKVTPCTCPQSLRPGTAHSPSQMSPAQRRQPLTRLRAWRRLILGPLGATPIRKSSRPASHLPDTAPWLSSARLEAPTGWPWGLLLHSIFELNKHISAVECLLTYLENTVVPPLAKGLGAGVRTEADVEEEALRRKLEELTSNVSDQETSSEEEEAKDEKAEPNRDKSVGPLPQADPEVGTAAHQTNRQEKSPQDPGDPVQYNRTTDEELSELEDRVAVTASEVQQAESEVSDIESRIAALRAAGLTVKPSGKPRRKSNLPIFLPRVAGKLGKRPEDPNADPSSEAKAMAVPYLLRRKFSNSLKSQGKDDDSFDRKSVYRGSLTQRNPNARKGMASHTFAKPVVAHQS

SEQ ID NO: 2441 - protein, 107 aa, Homo sapiens
MSNPSAPPPYEDRNPLYPGPPPPGGYGQPSVLPGGYPAYPGYPQPGYGHPAGYPQPMPPTHPMPMNYGPGHGYDGEERAVSDSFGPGEWDDRKVRHTFIRKVYSIIS

SEQ ID NO: 2442 - protein, 176 aa, Homo sapiens
MFIGGPNTRKDYHIEEGEEVFYQLEGDMVLRVLEQGKHRDVVIRQGEIFLLPARVPHSPQRFANTVGLVVERRRLETELDGLRYYVGDTMDVLFEKWFYCKDLGTQLAPIIQEFFSSEQYRTGKPIPDQLLKEPPFPLSTRSIMEPMSLDAWLDSHHRELQAGTPLSLFGDTYETQ

SEQ ID NO: 2443 - protein, 1886 aa, Homo sapiens
MFRQFYLWTCLASGIILGSLFEICLGQYDDDCKLARGGPPATIVAIDEESRNGTILVDNMLIKGTAGGPDPTIELSLKDNVDYWVLMDPVKQMLFLNSTGRVLDRDPPMNIHSIVVQVQCINKKVGTIIYHEVRIVVRDRNDNSPTFKHESYYATVNELTPVGTTIFTGFSGDNGATDIDDGPNGQIEYVIQYNPDDPTSNDTFEIPLMLTGNIVLRKRLNYEDKTRYFVIIQANDRAQNLNERRTTTTTLTVDVLDGDDLGPMFLPCVLVPNTRDCRPLTYQAAIPELRTPEELNPIIVTPPIQAIDQDRNIQPPSDRPGILYSILVGTPEDYPRFFHMHPRTAELSLLEPVNRDFHQKFDLVIKAEQDNGHPLPAFAGLHIEILDENNQSPYFTMPSYQGYILESAPVGATISDSLNLTSPLRIVALDKDIEDTKDPELHLFLNDYTSVFTVTQTGITRYLTLLQPVDREEQQTYTFSITAFDGVQESEPVIVNIQVMDANDNTPTFPEISYDVYVYTDMRPGDSVIQLTAVDADEGSNGEITYEILVGAQGDFIINKTTGLITIAPGVEMIVGRTYALTVQAADNAPPAERSTGILTLGKALDRESTDRYILIITASDGRPDGTSTATVNIVVTDVNDNAPVFDPYLPRNLSVVEEEANAFVGQVKATDPDAGINGQVHYSLGNFNNLFRITSNGSIYTAVKLNREVRDYYELVVVATDGAVHPRHSTLTLAIKVLDIDDNSPVFTNSTYTVLVEENLPAGTTILQIEAKDVDLGANVSYRIRSPEVKHFFALHPFTGELSLLRSLDYEAFPDQEASITFLVEAFDIYGTMPPGIATVTVIVKDMNDYPPVFSKRIYKGMVAPDAVKGTPITTVYAEDADPPGLPASRVRYRVDDVQFPYPASIFEVEEDSGRVITRVNLNEEPTTIFKLVVVAFDDGEPVMSSSATVKILVLHPGEIPRFTQEEYRPPPVSELATKGTMVGVISAAAINQSIVYSIVSGNEEDTFGINNITGVIYVNGPLDYETRTSYVLRVQADSLEVVLANLRVPSKSNTAKVYIEIQDENNHPPVFQKKFYIGGVSEDARMFTSVLRVKATDKDTGNYSVMAYRLIIPPIKEGKEGFVVETYTGLIKTAMLFHNMRRSYFKFQVIATDDYGKGLSGKADVLVSVVNQLDMQVIVSNVPPTLVEKKIEDLTEILDRYVQEQIPGAKVVVESIGARRHGDAFSLEDYTKCDLTVYAIDPQTNRAIDRNELFKFLDGKLLDINKDFQPYYGEGGRILEIRTPEAVTSIKKRGESLGYTEGALLALAFIIILCCIPAILVVLVSYRQFKVRQAECTKTARIQAALPAAKPAVPAPAPVAAPPPPPPPPPGAHLYEELGDSSMHNLFLLYHFQQSRGNNSVSEDRKHQQVVMPFSSNTIEAHKSAHVDGSLKSNKLKSARKFTFLSDEDDLSAHNPLYKENISQVSTNSDISQRTDFVDPFSPKIQAKSKSLRGPREKIQRLWSQSVSLPRRLMRKVPNRPEIIDLQQWQGTRQKAENENTGICTNKRGSSNPLLTTEEANLTEKEEIRQGETLMIEGTEQLKSLSSDSSFCFPRPHFSFSTLPTVSRTVELKSEPNVISSPAECSLELSPSRPCVLHSSLSRRETPICMLPIETERNIFENFAHPPNISPSACPLPPPPPISPPSPPPAPAPLAPPPDISPFSLFCPPPSPPSIPLPLPPPTFFPLSVSTSGPPTPPLLPPFPTPLPPPPPSIPCPPPPSASFLSTECVCITGVKCTTNLMPAEKIKSSMTQLSTTTVCKTDPQREPKGILRHVKNLAELEKSVANMYSQIEKNYLRTNVSELQTMCPSEVTNMEITSEQNKGSLNNIVEGTEKQSHSQSTSL

SEQ ID NO: 2444 - protein, 229 aa, Homo sapiens
KQAWRGSATRLGPQNSGRQECYAFNGTQRFLERYIYNREEFARFDSDVGEFRAVTELGRPAAEYWNSQKDILEEKRAVPDRMCRHNYELGGPMTLQRRVQPRVNVSPSKKGPLQHHNLLVCHVTDFYPGSIQVRWFLNGQEETAGVVSTNLIRNGDWTFQILVMLEMTPQQGDVYTCQVEHTSLDSPVTVEWKAQSDSARSKTLTGAGGFVLGLIICGVGIFMHRRSKK

SEQ ID NO: 2445 - protein, 1012 aa, Homo sapiens
MPAVASVPKELYLSSSLKDLNKKTEVKPEKISTKRYEEAEVRKKLEEKDRQEEAQRLQQKRQETGREDGGTLAKGSLENVLDSKDKTQKSNGEKNEKCETKEKGAITAKELYTMMTDKNISLIIMDARRMQDYQDSCILHSLSVPEEAISPGVTASWIEAHLPDDSKDTWKKRGNVEYVVLLDWFSSAKDLQIGTTLRSLKDALFKWESKTVLRNEPLVLEGGYENWLLCYPQYTTNAKVTPPPRRQNEEVSISLDFTYPSLEESIPSKPAAQTPPASIEVDENIELISGQNERMGPLNISTPVEPVAASKSDVSPIIQPVPSIKNVPQIDRTKKPAVKLPEEHRIKSESTNHEQQSPQSGKVIPDRSTKPVVFSPTLMLTDEEKARIHAETALLMEKNKQEKELRERQQEEQKEKLRKEEQEQKAKKKQEAEENEITEKQQKAKEEMEKKESEQAKKEDKETSAKRGKEITGVKRQSKSEHETSDAKKSVEDRGKRCPTPEIQKKSTGDVPHTSVTGDSGSGKAQREPLTRARSEEMGRIVPGLPSGWAKFLDPITGTFRYYHSPTNTVHMYPPEMAPSSAPPSTPPTHKAKPQIPAERDREPSKLKRSYSSPDITQAIQEEEKRKPTVTPTVNRENKPTCYPKAEISRLSASQIRNLNPVFGGSGPALTGLRNLGNTCYMNSILQCLCNAPHLADYFNRNCYQDDINRSNLLGHKGEVAEEFGIIMKALWTGQYRYISPKDFKITIGKINDQFAGYSQQDSQELLLFLMDGLHEDLNKADNRKRYKEENNDHLDDFKAAEHAWQKHKQLNESIIVALFQGQFKSTVQCLTCHKKSRTFEAFMYLSLPLASTSKCTLQDCLRLFSKEEKLTDNNRFYCSHCRARRDSLKKIEIWKLPPVLLVHLKRFSYDGRWKQKLQTSVDFPLENLDLSQYVIGPKNNLKKYNLFSVSNHYGGLDGGHYTAYCKNAARQRWFKFDDHEVSDISVSSVKSSAAYILFYTSLGPRVTDVAT

SEQ ID NO: 2446 - protein, 209 aa, Homo sapiens
ATKTASYDEHFRPEKLREWPEPESVSLMEVLAREDIDEAVCAILFKENSIVKRLDMYFQHVDTFKERRKEMLHKKWVENVAEPLQQRIMEKVTVPPFVDPLFQRQQEVDEERRTGLQCETGKRHSIKELEEIEKARLHASSPYFTFTSHCVIPKEWHKASARARSKTYKYSPEKLIYADKKQKRKEKKTADLSQAAFERQFLSSKLSQK

SEQ ID NO: 2447 - protein, 1001 aa, Homo sapiens
MPTEKKISSASDCINSMVEGSELKKVRSNSRIYHRYFLLDADMQSLRWEPSKKDSEKAKIDIKSIKEVRTGKNTDIFRSNGISDQISEDCAFSVIYGENYESLDLVANSADVANIWVTGLRYLISYGKHTLDMLESSQDNMRTSWVSQMFSEIDVDNLGHITLCNAVQCIRNLNPGLKTSKIELKFKELHKSKDKAGTEVTKEEFIEVFHELCTRPEIYFLLVQFSSNKEFLDTKDLMMFLEAEQGVAHINEEISLEIIHKYEPSKEGQEKGWLSIDGFTNYLMSPDCYIFDPEHKKVCQDMKQPLSHYFINSSHNTYLIEDQFRGPSDITGYIRALKMGCRSVELDVWDGPDNEPVIYTGHTMTSQIVFRSVIDIINKYAFFASEYPLILCLENHCSIKQQKVMVQHMKKLLGDKLYTTSPNVEESYLPSPDVLKGKILIKAKKLSSNCSGVEGDVTDEDEGAEMSQRMGKENMEQPNNVPVKRFQLCKELSELVSICKSVQFKEFQVSFQVQKYWEVCSFNEVLASKYANENPGDFVNYNKRFLARVFPSPMRIDSSNMNPQDFWKCGCQIVAMNFQTPGLMMDLNIGWFRQNGNCGYVLRPAIMREEVSFFSANTKDSVPGVSPQLLHIKIISGQNFPKPKGSGAKGDVVDPYVYVEIHGIPADCAEQRTKTVHQNGDAPIFDESFEFQINLPELAMVRFVVLDDDYIGDEFIGQYTIPFECLQTGYRHVPLQSLTGEVLAHASLFVHVAITNRRGGGKPHKRGLSVRKGKKSREYASLRTLWIKTVDEVFKNAQPPIRDATDLRENMQNAVVSFKELCGLSSVANLMQCMLAVSPRFLGPDNTPLVVLNLSEQYPTMELQGIVPEVLKKIVTTYDMMIQSLKALIENADAVYEKIVHCQKAAMEFHEHLHSIGTKEGLKERKLQKAVESFTWNITILKGQADLLKYAKNETLENLKQIHFAAVSCGLNKPGTENADVQKPRRSLEVIPEKANDETGE

SEQ ID NO: 2448 - protein, 2987 aa, Homo sapiens
MRSRLPPALAALGAALLLSSIEAEVDPPSDLNFKIIDENTVHMSWAKPVDPIVGYRITVDPTTDGPTKEFTLSASTTETLLSELVPETEYVVTITSYDEVEESVPVIGQLTIQTGSSTKPVEKKPGKTEIQKCSVSAWTDLVFLVDGSWSVGRNNFKYILDFIAALVSAFDIGEEKTRVGVVQYSSDTRTEFNLNQYYQRDELLAAIKKIPYKGGNTMTGDAIDYLVKNTFTESAGARVGFPKVAIIITDGKSQDEVEIPARELRNVGVEVFSLGIKAADAKELKQIASTPSLNHVFNVANFDAIVDIQNEIISQVCSGVDEQLGELVSGEEVVEPPSNLIAMEVSSKYVKLNWNPSPSPVTGYKVILTPMTAGSRQHALSVGPQTTTLSVRDLSADTEYQISVSAMKGMTSSEPISIMEKTQPMKVQVECSRGVDIKADIVFLVDGSYSIGIANFVKVRAFLEVLVKSFEISPNRVQISLVQYSRDPHTEFTLKKFTKVEDIIEAINTFPYRGGSTNTGKAMTYVREKIFVPSKGSRSNVPKVMILITDGKSSDAFRDPAIKLRNSDVEIFAVGVKDAVRSELEAIASPPAETHVFTVEDFDAFQRISFELTQSICLRIEQELAAIKKKAYVPPKDLSFSEVTSYGFKTNWSPAGENVFSYHITYKEAAGDDEVTVVEPASSTSVVLSSLKPETLYLVNVTAEYEDGFSIPLAGEETTEEVKGAPRNLKVTDETTDSFKITWTQAPGRVLRYRIIYRPVAGGESREVTTPPNQRRRTLENLIPDTKYEVSVIPEYFSGPGTPLTGNAATEEVRGNPRDLRVSDPTTSTMKLSWSGAPGKVKQYLVTYTPVAGGETQEVTVRGDTTNTVLQGLKEGTQYALSVTALYASGAGDALFGEGTTLEERGSPQDLVTKDITDTSIGAYWTSAPGMVRGYRVSWKSLYDDVDTGEKNLPEDAIHTMIENLQPETKYRISVFATYSSGEGEPLTGDATTELSQDSKTLKVDEETENTMRVTWKPAPGKVVNYRVVYRPHGRGKQMVAKVPPTVTSTVLKRLQPQTTYDITVLPIYKMGEGKLRQGSGTTASRFKSPRNLKTSDPTMSSFRVTWEPAPGEVKGYKVTFHPTGDDRRLGELVVGPYDNTVVLEELRAGTTYKVNVFGMFDGGESSPLVGQEMTTLSDTTVMPILSSGMECLTRAEADIVLLVDGSWSIGRANFRTVRSFISRIVEVFDIGPKRVQIALAQYSGDPRTEWQLNAHRDKKSLLQAVANLPYKGGNTLTGMALNFIRQQNFRTQAGMRPRARKIGVLITDGKSQDDVEAPSKKLKDEGVELFAIGIKNADEVELKMIATDPDDTHAYNVADFESLSRIVDDLTINLCNSVKGPGDLEAPSNLVISERTHRSFRVSWTPPSDSVDRYKVEYYPVSGGKRQEFYVSRMETSTVLKDLKPETEYVVNVYSVVEDEYSEPLKGTEKTLPVPVVSLNIYDVGPTTMHVQWQPVGGATGYILSYKPVKDTEPTRPKEVRLGPTVNDMQLTDLVPNTEYAVTVQAVLHDLTSEPVTVREVTLPLPRPQDLKLRDVTHSTMNVFWEPVPGKVRKYIVRYKTPEEDVKEVEVDRSETSTSLKDLFSQTLYTVSVSAVHDEGESPPVTAQETTRPVPAPTNLKITEVTSEGFRGTWDHGASDVSLYRITWAPFGSSDKMETILNGDENTLVFENLNPNTIYEVSITAIYPDESESDDLIGSERTLPILTTQAPKSGPRNLQVYNATSNSLTVKWDPASGRVQKYRITYQPSTGEGNEQTTTIGGRQNSVVLQKLKPDTPYTITVSSLYPDGEGGRMTGRGKTKPLNTVRNLRVYDPSTSTLNVRWDHAEGNPRQYKLFYAPAAGGPEELVPIPGNTNYAILRNLQPDTSYTVTVVPVYTEGDGGRTSDTGRTLMRGLARNVQVYNPTPNSLDVRWDPAPGPVLQYRVVYSPVDGTRPSESIVVPGNTRMVHLERLIPDTLYSVNLVALYSDGEGNPSPAQGRTLPRSGPRNLRVFGETTNSLSVAWDHADGPVQQYRIIYSPTVGDPIDEYTTVPGRRNNVILQPLQPDTPYKITVIAVYEDGDGGHLTGNGRTVGLLPPQNIHISDEWYTRFRVSWDPSPSPVLGYKIVYKPVGSNEPMEAFVGEMTSYTLHNLNPSTTYDVNVYAQYDSGLSVPLTDQGTTLYLNVTDLKTYQIGWDTFCVKWSPHRAATSYRLKLSPADGTRGQEITVRGSETSHCFTGLSPDTDYGVTVFVQTPNLEGPGVSVKEHTTVKPTEAPTEPPTPPPPPTIPPARDVCKGAKADIVFLTDASWSIGDDNFNKVVKFIFNTVGGFDEISPAGIQVSFVQYSDEVKSEFKLNTYNDKALALGALQNIRYRGGNTRTGKALTFIKEKVLTWESGMRKNVPKVLVVVTDGRSQDEVKKAALVIQQSGFSVFVVGVADVDYNELANIASKPSERHVFIVDDFESFEKIEDNLITFVCETATSSCPLIYLDGYTSPGFKMLEAYNLTEKNFASVQGVSLESGSFPSYSAYRIQKNAFVNQPTADLHPNGLPPSYTIILLFRLLPETPSDPFAIWQITDRDYKPQVGVIADPSSKTLSFFNKDTRGEVQTVTFDTEEVKTLFYGSFHKRDEGKCPAFPNSCTCTQDSVGPPGPPGPAGGPGAKGPRGERGISGAIGPPGPRGDIGPPGPQGPPGPQGPNGLSIPGEQGRQGMKGDAGEPGLPGRTGTPGLPGPPGPMGPPGDRGFTGKDGAMGPRGPPGPPGSPGSPGVTGPSGKPGKPGDHGRPGPSGLKGEKGDRGDIASQNMMRAVARQVCEQLISGQMNRFNQMLNQIPNDYQSSRNQPGPPGPPGPPGSAGARGEPGPGGRPGFPGTPGMQGPPGERGLPGEKGERGTGSSGPRGLPGPPGPQGESRTGPPGSTGSRGPPGPPGRPGNSGIRGPPGPPGYCDSSQCASIPYNGQGYPGSG

SEQ ID NO: 2449 - protein, 203 aa, Homo sapiens
MSRESDVEAQQSHGSSACSQPHGSVTQSQGSSSQSQGISSSSTSTMPNSSQSSHSSSGTLSSLETVSTQELYSIPEDQEPEDQEPEEPTPAPWARLWALQDGFANLECVNDNYWFGRDKSCEYCFDEPLLKRTDKYRTYSKKHFRIFREVGPKNSYIAYIEDHSGNGTFVNTELVGKGKRRPLNNNSEIALSLSRNKVVPVER

SEQ ID NO: 2450 - protein, 223 aa, Homo sapiens
METPLDVLSRAASLVHADDEKREAALRGEPRIQTLPVASALSSHRTGPPPISPSKRKFSMEPGDEDLDCDNDHVSKMSRIFNPHLNKTANGDCRRDPRERSRSPIERAVAPTMSLHGSHLYTSLPSLGLEQPLALTKNSLDASRPAGLSPTLTPGERQQNRPSVITCASAGARNCNLSHCPIAHSGCAAPGPASYRRPPSAATTCDPVVEEHFRRSLGKNYKE

SEQ ID NO: 2451 - protein, 95 aa, Homo sapiens
MLPPQKKPWESMAKGLVLGALFTSFLLLVYSYAVPPLHAGLASTTPEAAASCSPPALEPEAVIRANGSAGECQPRRNIVFLKTHKTASSTLLNIL

SEQ ID NO: 2452 - protein, 295 aa, Homo sapiens
MTENTHFDKIPESCALKSWRHPGLHHGEAALRGEPRIQTLPVASALSSHRTGPPPISPSKRKFSMEPGDEDLDCDNDHVSKMSRIFNPHLNKTANGDCRRDPRERSRSPIERAVAPTMSLHGSHLYTSLPSLGLEQPLALTKNSLDASRPAGLSPTLTPGERQQNRPSVITCASAGARNCNLSHCPIAHSGCAAPGPASYRRPPSAATTCDPVVEEHFRRSLGKNYKEPEPAPNSVSITGSVDDHFAKALGDTWLQIKAAKDGASSSPESASRRGQPASPSAHMVSHSHSPSVVS

SEQ ID NO: 2453 - protein, 173 aa, Homo sapiens
CLHSKEHSIKATLIWRLFFLIMFLTIIVCGMVAALSAIRANCHQEPSVCLQAACPESWIGFQRKCFYFSDDTKNWTSSQRFCDSQDADLAQVESFQELNFLLRYKGPSDHWIGLSREQGQPWKWINGTEWTRQLVMKEDGANLYVAKVSQVPRMNPRPVMVSYPGSRRVCLFE

SEQ ID NO: 2454 - protein, 216 aa, Homo sapiens
MKVLWAALLVTFLAGCQAKVEQAVETEPEPELRQQTEWQSGQRWELALGRFWDYLRWVQTLSEQVQEELLSSQVTQELRALMDETMKELKAYKSELEEQLTPVAEETRARLSKELQAAQARLGADMEDVCGRLVQYRGEVQAMLGQSTEELRVRLASHLRKLRKRLLRDADDLQKRLAVYQAGAREGAERGLSAIRERLGPLVEQGRVRAATVGSL

SEQ ID NO: 2455 - protein, 245 aa, Homo sapiens
MAAAPPSYCFVAFPPRAKDGLVVFGKNSARPRDEVQEVVYFSAADHEPESKVECTYISIDQVPRTYAIMISRPAWLWGAEMGANEHGVCIANEAINTREPAAEIEALLGMDLVRLGLERGETAKEALDVIVSLLEEHGQGGNYFEDANSCHSFQSAYLIVDRDEAWVLETIGKYWAAEKVTEGVRCICSQLSLTTKMDAEHPELRSYAQSQGWWTGEGEFNFSEVFSPVEDHLDCGAGKDSLEKQ

SEQ ID NO: 2456 - protein, 254 aa, Homo sapiens
MGLSTVPDLLLPLVLLELLVGIYPSGVIGLVPHLGDREKRDSVCPQGKYIHPQNNSICCTKCHKGTYLYNDCPGPGQDTDCRECESGSFTASENHLRHCLSCSKCRKEMGQVEISSCTVDRDTVCGCRKNQYRHYWSENLFQCFNCSLCLNGTVHLSCERSSPEAKPSPHPRGWPLPHAVALPFLPPPVFCGSDNQLLSGRPHPVPRHFLCPVGWGCRRFSFSCAALLPTGQEKQNTVCTCHAGFFLRENECVS

SEQ ID NO: 2457 - protein, 101 aa, Homo sapiens
MEEPTAVEGQVQLPSPHQGSLRKAVAAALALDGESTMGHRKKKRKESRPESIIIYRSDNEKTDEEPGESEGGDQPKEEEGDDFLDYPVDDDMWNLPLDSRY

SEQ ID NO: 2458 - protein, 177 aa, Homo sapiens
MAASLVVQILGDKFPCTLVAQKIDLPEYQGEPDEISIQKCQEAVRQVQGPVLVEDTCLCFNALGGLPGPYIKWFLEKLKPEGLHQLLAGFEDKSAYALCTFALSTGDPSQPVRLFRGRTSGRIVAPRGCQDFGWDPCFQPDGYEQTYAEMPKAEKNAVSHRFRALLELQEYFGSLAA

SEQ ID NO: 2459 - protein, 451 aa, Homo sapiens
MVELFIFLFLLGETPFKVVVKSLSPKELVRIHVPKPLDRNDGTFLMRYRMYETVDEGLKIEVLYGDEHVAQSPYILKGPVYHEYCECPEDPQAWQKTLSCPTKEPQIAKDFASFPSINLQQMLKEVPKRFGDERGAIVHYTILNNHVYRRSLGKYTDFKMFSDEILLSLTRKVLLPDLEFYVNLGDWPLEHRKVNGTPSPIPIISWCGSLDSRDVVLPTYDITHSMLEAMRGVTNDLLSIQGNTGPSWINKTERAFFRGRDSREERLQLVQLSKENPQLLDAGITGYFFFQEKEKELGKAKLMGFFDFFKYKYQVNVDGTVAAYRYPYLMLGDSLVLKQDSPYYEHFYMALEPWKHYVPIKRNLSDLLEKVKWAKENDEEAKKIAKEGQLMARDLLQPHRLYCYYYQVLQKYAERQSSKPEVRDGMELVPQPEDSTAICQCHRKKPSREEL

SEQ ID NO: 2460 - protein, 115 aa, Homo sapiens
MAFMTRKLWDLEQQVKAQTDEILSKDQKIAALEDLVQTLRPHPAEATLQRQEELETMCVQLQRQVREMERFLSDYGLQWVGEPMDQEDSESKTVSEHGERDWMTAKKFWKPGRAG

SEQ ID NO: 2461 - protein, 257 aa, Homo sapiens
MSEVPVARVWLVLLLLTVQVGVTAGAPWQCAPCSAEKLALCPPVSASCSEVTRSAGCGCCPMCALPLGAACGVATARCARGLSCRALPGEQQPLHALTRGQGACVQESDASAPHAAEAGSPESPESTEITEEELLDNFHLMAPSEEDHSILWDAISTYDGSKALHVTNIKKWKEPCRIELYRVVESLAKAQETSGEEISKFYLPNCNKNGFYHSRQTSMDGEAGLCWCVYPWNGKRIPGSPEIRGDPNCQIYFNVQN

SEQ ID NO: 2462 - protein, 712 aa, Homo sapiens
MLKDYLSVAQDALRTQKELYHVKEQRLALALDEYVRLNDAYKEKSSSHTSLFSGSSSSTKYDPDILKAEISTTRLRVKKLKRELSQMKQELLYKEQGFETLQQIDKKMSGGQSGYELSEAKAILTELKSIRKAISSGEKEKQDLMQSLAKLQERFHLDQNIGRSEPDLRCSPVNSHLCLSRQTLDAGSQTSISGDIGVRSRSNLAEKVRLSLQYEEAKRSMANLKIELSKLDSEAWPGALDIEKEKLMLINEKEELLKELQFVTPQKRTQDELERLEAERQRLEEELLSVRGTPSRALAERLRLEERRKELLQKLEETTKLTTYLHSQLKSLSASTLSMSSGSSLGSLASSRGSLNTSSRGSLNSLSSTELYYSSQSDQIDVDYQYKLDFLLQEKSGYIPSGPITTIHENEVVKSPSQPGQSGLCGVAAAATGHTPPLAEAPKSVASLSSRSSLSSLSPPGSPLVLEGTFPMSSSHDASLHQFTADFEDCELSSHFADISLIENQILLDSDSGGASQSLSEDKDLNECAREPLYEGTADVEKSLPKRRVIHLLGEKTTCVSAAVSDESVAGDSGVYEAFVKQPSEMEDVTYSEEDVAIVETAQVQIGLRYNAKSSSFMVIIAQLRNLHAFLIPHTSKVYFRVAVLPSSTDVSCLFRTKVHPPTESILFNDVFRVAISQTALQQKTLRKNFTFVTAITHGVCLPLPVPMPSFA

SEQ ID NO: 2463 - protein, 599 aa, Homo sapiens
HPSPRHQPRQVAGTPTSSQPSFGPSIRERPSQSLCPCPCPAGEGDPAWPALERRLVTSRGRQPSPQSHAQLLTRRRHSSEQVPPESEPRADFRSGKWLQEPATGDARDSRQALRARMSSKHRICSQEEVVIPCAYDSDSESVDLELSNLEIIKKGSSSIELTDLDIPDIPGLHCEPLSHSPRHLTQQDPLSEAIVEKLIQSIQKVFNGELKGELEKLKFLGDLSSLSQALPYDETAKSFIHSHIADIVHTLNVLVQEERPHSLSSSMRQEVFVTIADLSYQDVHLLLGSEDRAELFSLTIKSIITLPSVRTLTQIQEIMPNGTCNTECLYRQTFQAFSEMLQSLVVKDPHLENLDTIIKLPLRFQRLGHLVALMALLCGDPQEKVAEEAAEGIHSLLHITLRLKYITHDKKDQQNLKRALTKCREFLELHSSAAKCFYNCPFRIAQVFEGFLDSNELCQFIMTTFDTLKTLKHPCIQRSAGELLLTLAKNTESQFEKVPEIMGVICAQLSIISQPRVRQQIINTVSLFISRPKYTDIVLSFLLCHPVPYNRHLAEVWRMLSVELPSTTWILWRLLRKLQKCHNEPAQEKMAYVAVAVSP

SEQ ID NO: 2464 - protein, 269 aa, Homo sapiens
MSSGASRKSWDPGNPWPPDWPITGRKMKVLWAALLVTFLAGCQAKVEQAVETEPEPELRQQTEWQSGQRWELALGRFWDYLRWVQTLSEQVQEELLSSQVTQELRALMDETMKELKAYKSELEEQLTPVAEETRARLSKELQAAQARLGADMEDVCGRLVQYRGEVQAMLGQSTEELRVRLASHLRKLRKRLLRDADDLQKRLAVYQAGAREGAERGLSAIRERLGPLVEQGRVRAATVGSLAGQPLQERAQAWGERLRARMEEMGSRT

SEQ ID NO: 2465 - protein, 289 aa, Homo sapiens
MTPIVTVLICLRLSLGPRTHVQAGTLPKPTLWAEPGSVITQGSPVTLWCQGILETQEYRLYREKKTAPWITRIPQEIVKKGQFPIPSITWEHTGRYRCFYGSHTAGWSEPSDPLELVVTGAYIKPTLSALPSPVVTSGGNVTLHCVSQVAFGSFILCKEGEDEHPQCLNSQPRTHGWSRAIFSVGPVSPSRRWSYRCYAYDSNSPHVWSLPSDLLELLVLGAAETLSPPQNKSDSKAGAANTLSPSQNKTASHPQDYTVENLIRMGIAGLVLVVLGILLFEAQHSQRSL

SEQ ID NO: 2466 - protein, 397 aa, Homo sapiens
MDSSAAPTNASNCTDALAYSSCSPAPSPGSWVNLSHLDGNLSDPCGPNRTDLGGRDSLCPPTGSPSMITAITIMALYSIVCVVGLFGNFLVMYVIVRYTKMKTATNIYIFNLALADALATSTLPFQSVNYLMGTWPFGTILCKIVISIDYYNMFTSIFTLCTMSVDRYIAVCHPVKALDFRTPRNAKIINVCNWILSSAIGLPVMFMATTKYRQGSIDCTLTFSHPTWYWENLLKICVFIFAFIMPVLIITVCYGLMILRLKSVRMLSGSKEKDRNLRRITRMVLVVVAVFIVCWTPIHIYVIIKALVTIPETTFQTVSWHFCIALGYTNSCLNPVLYAFLDENFKRCFREFCIPTSSNIEQQNSTRIRQNTRDHPSTANTVDRTNHQRERRQKSDW

SEQ ID NO: 2467 - protein, 116 aa, Homo sapiens
MGIKTALPAAELGLYSLVLSGALAYAGRGLLEASQDGAHRKAFRESVRPGWEYIGRKMDVADFEWVMWFTSFRNVIIFALSGHVLFAKLCTMVAPKSGFVTGTFDLQEVLFHGGSS

SEQ ID NO: 2468 - protein, 479 aa, Homo sapiens
MLLLLLPLLWGRERAEGQTSKLLTMQSSVTVQEGLCVHVPCSFSYPSHGWIYPGPVVHGYWFREGANTDQDAPVATNNPARAVWEETRDRFHLLGDPHTKNCTLSIRDARRSDAGRYFFRMEKGSIKWNYKHHRLSVNVTALTHRPNILIPGTLESGCPQNLTCSVPWACEQGTPPMISWIGTSVSPLDPSTTRSSVLTLIPQPQDHGTSLTCQVTFPGASVTTNKTVHLNVSYPPQNLTMTVFQGDGTVSTVLGNGSSLSLPEGQSLRLVCAVDAVDSNPPARLSLSWRGLTLCPSQPSNPGVLELPWVHLRDAAEFTCRAQNPLGSQQVYLNVSLQSKATSGVTQGVVGGAGATALVFLSFCVIFVVVRSCRKKSARPAAGVGDTGIEDANAVRGSASQILNHFIGFPTFLGLGFEFLLNLRDLCCHPDSEFYVYHFSHFRLIKNIAGEIVWSLEGKILWLLDVSDFFHWFFLICVG

SEQ ID NO: 2469 - protein, 985 aa, Homo sapiens
MARRGKKPVVRTLEDLTLDSGYGGAADSVRSSNLSLCCSDSHPASPYGGSCWPPLADSMHSRHNSFDTVNTALVEDSEGLDCAGQHCSRLLPDLDEVPWTLQELEALLLRSRDPRAGPAVPGGLPKDALAKLSTLVSRALVRIAKEAQRLSLRFAKCTKYEIQSAMEIVLSWGLAAHCTAAALAALSLYNMSSAGGDRLGRGKSARCGLTFSVGRVYRWMVDSRVALRIHEHAAIYLTACMESLFRDIYSRVVASGVPRSCSGPGSGSGSGPGPSSGPGAAPAADKEREAPGGGAASGGACSAASSASGGSSCCAPPAAAAAAVPPAAAANHHHHHHHALHEAPKFTVETLEHTVNNDSEIWGLLQPYQHLICGKNASGVLCLPDSLNLHRDPQRSNKPGELPMFSQSELRTIEQSLLATRVGSIAELSDLVSRAMHHLQPLNAKHHGNGTPLHHKQGALYWEPEALYTLCYFMHCPQMEWENPNVEPSKVNLQVERPFLVLPPLMEWIRVAVAHAGHRRSFSMDSDDVRQAARLLLPGVDCEPRQLRADDCFCASRKLDAVAIEAKFKQDLGFRMLNCGRTDLVKQAVSLLGPDGINTMSEQGMTPLMYACVRGDEAMVQMLLDAGADLNVEVVSTPHKYPSVHPETRHWTALTFAVLHGHIPVVQLLLDAGAKVEGSVEHGEENYSETPLQLAAAVGVPWTLHTWLESLRIAFQQHRRPLIQCLLKEFKTIQEEEYTEELVTQGLPLMFEILKASKNEVISQQLCVIFTHCYGPYPIPKLTEIKRKQTSRLDPHFLNNKEMSDVTFLVEGRPFYAHKVLLFTASPRFKALLSSKPTNDGTCIEIGYVKYSIFQLVMQYLYYGGPESLLIKNNEIMELLSAAKFFQLEALQRHCEIICAKSINTDNCVDIYNHAKFLGVTELSAYCEGYFLKNMMVLIENEAFKQLLYDKNGEGTGQDVLQDLQRTLAIRIQSIHLSSSKGSVV

SEQ ID NO: 2470 - protein, 698 aa, Homo sapiens
MAFAWWPCLILALLSSLAASGFPRSPFRLLGKRSLPEGVANGIEVYSTKINSKVTSRFAHNVVTMRAVNRADTAKEVSFDVELPKTAFITNFTLTIDGVTYPGNVKEKEVAKKQYEKAVSQGKTAGLVKASGRKLEKFTVSVNVAAGSKVTFELTYEELLKRHKGKYEMYLKVQPKQLVKHFEIEVDIFEPQGISMLDAEASFITNDLLGSALTKSFSGKKGHVSFKPSLDQQRSCPTCTDSLLNGDFTITYDVNRESPGNVQIVNGYFVHFFAPQGLPVVPKNVAFVIDISGSMAGRKLEQTKEALLRILEDMQEEDYLNFILFSGDVSTWKEHLVQATPENLQEARTFVKSMEDKGMTNINDGLLRGISMLNKAREEHRIPERSTSIVIMLTDGDANVGESRPEKIQENVRNAIGGKFPLYNLGFGNNLNYNFLENMALENHGFARRIYEDSDADLQLQGFYEEVANPLLTGVEMEYPENAILDLTQNTYQHFYDGSEIVVAGRLVDEDMNSFKADVKGHGATNDLTFTEEVTTEKITLWNRAVPSTFSWLDTVTVTQDGLSMMINRKNMVVSFGDGVTFVVVLHQVWKKHPVHRDFLGFYVVDSHRMSAQTHGLLGQFFQPFDFKVSDIRPGSDPTKPDATLVVKNHQLIVTRGSQKDYRKDASIGTKVVCWFVHNNGEGLIDGVHTDYIVPNLF

SEQ ID NO: 2471 - protein, 1018 aa, Homo sapiens [sequence omitted]

SEQ ID NO: 2472 - protein, 228 aa, Homo sapiens
MKPKMKYSTNKISTAKWKNTASKALCFKLGKSQQKAKEVCPMYFMKLRSGLMIKKEACYFRRETTKRPSLKTGRKHKRHLVLAACQQQSTVECFAFGISGVQKYTRALHDSSITDKVLLSYYESQHPSNESGDGVDGKMLMVTLSPTKDFWLHANNKEHSVELHKCEKPLPDQAFFVLHNMHSNCVSFECKTDPGVFIGVKDNHLALIKVDSSENLCTENILFKLSET

SEQ ID NO: 2473 - protein, 346 aa, Homo sapiens
MISRPAWLWGAEMGANEHGVCIANEAINTREPAAEIEALLGMDLVRLGLERGETAKEALDVIVSLLEEHGQGGNYFEDANSCHSFQSAYLIVDRDEAWVLETIGKYWAAEKVTEGVRCICSQLSLTTKMDAEHPELRSYAQSQGWWTGEGEFNFSEVFSPVEDHLDCGAGKDSLEKQEESITVQTMMNTLRDKASGVCIDSEFFLTTASGVSVLPQNRSSPCIHYFTGTPDPSRSIFKPFIFVDDVKLVPKTQSPCFGDDDPAKKEPRFQEKPDRRHELYKAHEWARAIIESDQEQGRKLRSTMLELEKQGLEAMEEILTSSEPLDPAEVGDLFYDCVDTEIKFFK

SEQ ID NO: 2474 - protein, 725 aa, Homo sapiens
MGLWWVTVQPPARRMGWLPLLLLLTQCLGVPGQRSPLNDFQVLRGTELQHLLHAVVPGPWQEDVADAEECAGRCGPLMDCRAFHYNVSSHGCQLLPWTQHSPHTRLRRSGRCDLFQKKDYVRTCIMNNGVGYRGTMATTVGGLPCQAWSHKFPNDHKYTPTLRNGLEENFCRNPDGDPGGPWCYTTDPAVRFQSCGIKSCREAACVWCNGEEYRGAVDRTESGRECQRWDLQHPHQHPFEPGKFLDQGLDDNYCRNPDGSERPWCYTTDPQIEREFCDLPRCGSEAQPRQEATTVSCFRGKGEGYRGTANTTTAGVPCQRWDAQIPHQHRFTPEKYACKDLRENFCRNPDGSEAPWCFTLRPGMRAAFCYQIRRCTDDVRPQDCYHGAGEQYRGTVSKTRKGVQCQRWSAETPHKPQFTFTSEPHAQLEENFCRNPDGDSHGPWCYTMDPRTPFDYCALRRCADDQPPSILDPPDQVQFEKCGKRVDRLDQRRSKLRVVGGHPGNSPWTVSLRNRQGQHFCGGSLVKEQWILTARQCFSSCHMPLTGYEVWLGTLFQNPQHGEPSLQRVPVAKMVCGPSGSQLVLLKLERSVTLNQRVALICLPPEWYVVPPGTKCEIAGWGETKGTGNDTVLNVALLNVISNQECNIKHRGRVRESEMCTEGLLAPVGACEGDYGGPLACFTHNCWVLEGIIIPNRVCARSRWPAVFTRVSVFVDWIHKVMRLG

SEQ ID NO: 2475 - protein, 329 aa, Homo sapiens
MCGATSFLHECTRLILVTTQNAEFLQKGLQVHTCFGVYPHASVWHDCASQKKGCAVYLHVSVEFNKLIPENGFIKFHQVRRVMTILFLTMVISYFGCMKAAPMKEANIRGQGGLAYPGVRTHGTLESVNGPKAGSRGLTSLADTFEHVIEELLDEDQKVRPNEENNKDADLYTSRVMLSSQVPLEPPLLFLLEEYKNYLDAANMSMRVRRHSDPARRGELSVCDSISEWVTAADKKTAVDMSGGTVTVLEKVPVSKGQLKQYFYETKCNPMGYTKEGCRGIDKRHWNSQCRTTQSYVRALTMDSKKRIGWRFIRIDTSCVCTLTIKRGR

SEQ ID NO: 2476 - protein, 191 aa, Homo sapiens
MFPPSGHQDVSERRLDTQRPQVTMWERDVSSDRQEPGRRGRSWGLEGSQALSQQAEVIVRQLQELRRLEEEVRLLRETSLQQKMRLEAQAMELEALARAEKAGRAEAEGLRAALAGAEVVRKNLEEGSQRELEEVQRLHQEQLSSLTQAHEEALSSLTSKAEGLEKSLSSLETRRAGEAKELAEAQREAEL

SEQ ID NO: 2477 - protein, 175 aa, Homo sapiens
MAGGVTVTNGVKGKKSTCPSAAPSASAPAMTTVENKSKISTGTASSTKRSTSTGNKESSSTRERLRERTRLNQSKKLPSAGQGANDMALAKRSRSRTATECDVRMSKSKSDNQISDRAALEAKVKDLLTLAKTKDVEILHLRNELRDMRAQLGINEDHSEGDEKSEKETIMAHQP

SEQ ID NO: 2478 - protein, 114 aa, Homo sapiens
MLTAAGSTAELSACAISGLFNCITIHPLNIAAGVWMIMNAFILLLCEAPFCCQFIEFANTVAEKVDRLRSWQKAVFYCGMAVVPIVISLTLTTLLGNAIAFATGVLYGLSALGK

SEQ ID NO: 2479 - protein, 98 aa, Homo sapiens
MLPPQKKPWESMAKGLVLGALFTSFLLLVYSYAVPPLHAGLASTTPEAAASCSPPALEPEAVIRANGSAGECQPRRNIVFLKTHKTASSTLLNILFRF

SEQ ID NO: 2480 - protein, 140 aa, Homo sapiens
MSNPSAPPPYEDRNPLYPGPPPPGGYGQPSVLPGGYPAYPGYPQPGYGHPAGYPQPMPPTHPMPMNYGPGHGYDGEERAVSDSFGPGEWDDRKVRHTFIRKVYSIISVQLLITVAIIAIFTFVEPVSAFVRRNVAVYYVS

SEQ ID NO: 2481 - protein, 464 aa, Homo sapiens
MAAQPPRPVGERSMGSSREAARAPARSPAWASTQASTPGAALAVQRESPESGLQKHYSNLCMEKSQKINPFILHILQEVDEEIKKGLAAGITLNIAGNNRLVPVERVTGEDFWILSKILKNCLYINGLDVGYNLLCDVGAYYAAKLLQKQLNLIYLNLMFNDIGPEGGELIAKVLHKNRTLKYLRMTGNKIENKGGMFFAAMLQINSSLEKLDLGDCDLGMQSVIAFATVLTQNQAIKAINLNRPILYSEQEESTVHVGRMLKENHCLVALHMCKHDIKNSGIQQLCDALYLNSSLRYLDVSCNKITHDGMVYLADVLKSNTTLEVIDLSFNRIENAGANYLSETLTSHNRSLKALSVVSNNIEGEGLVALSQSMKTNLTFSHIYIWGNKFDEATCIAYSDLIQMGCLKPDNTDVEPFVVDGRVYLAEVSNGLKKHYYWTSTYGESYDHSSNAGFALVPVGQQP

SEQ ID NO: 2482 - protein, 394 aa, Homo sapiens
MEIRLPDLALKRIFSFLDLFGLLQVSQVNKHWNRIADSDYLWRSLSLQRWDCSNFTNQHLGTHTWKQFFLHQRRKELRLALAQPHNFIYKVTKNIAFETELAYLSGNRLTVDEQEKSIICSVSPKQELCAWDVQEVGDAAGDIYTFTLPGLRDVSKVTAFQYGIVLLHCSPDKKWVFACGTYSRTLPQVFLTESLLRPSEGSVPLSTFLPHKLCASACWTPKVKNRITLMSQSSTGKKTEFITFDLTTKKTGGQTVIQAYEIASFQVAAHLKCPIWMGASDGYMIVFTSGPYLLLFSITGFLLQRFEDHQAAINNFWVDPCYVLTTSENSVHVYMWEEGGRHPYLRSCCHLENTWHDHTTDSCISSVMCDNASIVLRVRKVSDSSILVMYSLNT

SEQ ID NO: 2483 - protein, 363 aa, Homo sapiens
MERRRLLGGMALLLLQALPSPLSARAEPPQDKEACVGTNNQSYICDTGHCCGQSQCCNYYYELWWFWLVWTIIIILSCCCVCHHRRAKHRLQAQQRQHEINLIAYREAHNYSALPFYFRFLPNYLLPPYEEVVNRPPTPPPPYSAFQLQQQQLLPPQCGPAGGSPPGIDPTRGSQGAQSSPLSEPSRSSTRPPSIADPDPSDLPVDRAATKAPGMEPSGSVAGLGELDPGAFLDKDAECREELLKDDSSEHGAPDSKEKTPGRHRRFTGDSGIEVCVCNRGHHDDDLKEFNTLIDDALDGPLDFCDSCHVRPPGDEEEGLCQSSEEQAREPGHPHLPRPPACLLLNTINEQDSPNSQSSSSPS

SEQ ID NO: 2484 - protein, 339 aa, Homo sapiens
MGEMEQLRQEAEQLKKQIADARKACADVTLAELVSGLEVVGRVQMRTRRTLRGHLAKIYAMHWATDSKLLVSASQDGKLIVWDSYTTNKVHAIPLRSSWVMTCAYAPSGNFVACGGLDNMCSIYNLKSREGNVKVSRELSAHTGYLSCCRFLDDNNIVTSSGDTTALWDIETGQQKTVFVGHTGDCMSLAVSPDFNLFISGACDASAKLWDVREGTCRQTFTGHESDINAICFFPNGEAICTGSDDASCRLFDLRADQELICFSHESIICGITSVAFSLSGRLLFAGYDDFNCNVWDSMKSERVGILSGHDNRVSCLGVTADGMAVATGSWDSFLKIWN

SEQ ID NO: 2485 - protein, 85 aa, Homo sapiens
MVHLTPEEKTAVNALWGKVNVDAVGGEALGSSWAMCWCVCWPATLARNSPHKCRLPIRRWWLVWLMPWLTSTIEILDCFLITIRR

SEQ ID NO: 2486 - protein, 467 aa, Homo sapiens
MASLLQSDRVLYLVQGEKKVRAPLSQLYFCRYCSELRSLECVSHEVDSHYCPSCLENMPSAEAKLKKNRCANCFDCPGCMHTLSTRATSISTQLPDDPAKTTMKKAYYLACGFCRWTSRDVGMADKSVASGGWQEPENPHTQRMNKLIEYYQQLAQKEKVERDRKKLARRRNYMPLAFSQHTIHVVDKYGLGTRLQRPRAGASISTLAGLSLKEGEDQKEIKIEPAQAVDEVEPLPEDYYTRPVNLTEVTTLQQRLLQPDFQPVCASQLYPRHKHLLIKRSLRCRKCEHNLSKPEFNPTSIKFKIQLVAVNYIPEVRIMSIPNLRYMKESQVLLTLTNPVENLTHVTLFECEEGDPDDINSTAKVVVPPKELVLAGKDAAAEYDELAEPQDFQDDPDIIAFRKANKVGIFIKVTPQREEGEVTVCFKMKHDFKNLAAPIRPIEESDQGTEVIWLTQHVELSLGPLLP

SEQ ID NO: 2487 - protein, 1468 aa, Homo sapiens
MTRMSCPWGSYQWEPGACPAAPRGIGGGDMAGGIPDVRGLQEAALGAGRSQEEARLVEEAQTPVMLPQDSGQRVEEVPGDLMAKRMSLILHVQKLPWDHVPCLRRTRQNLYQDVGGHAHGSGLGGAKRGAARSALRRPLPPATCRPAGIVSGPSPRLDSNPTGAHLIKQTRPLTVEWTKDTPVPEPMELRSDASHKENVSPKPAALPKPGKRLKQRRFRRSLGIGLSGRHDQWVPGCQVERGGPAATPSPGAVLDQEPCRVQTNLASPGPRLGLALKDTTGQLVNSSFWQQSNLQSLARRRQGKAREFAIQQSNLSINETSSPHLCPEPGGSSGPHKLPWGPLLSQEPLARPSSCLRQSGLPAPGTPSGDFRPTEAFAPLDGHTQPGLRSWGGLGSWRSRLVGEPLTLEDLAVPSQNQTQAPSRAAVHQLLASVHCLAQEAARLRCQAPQEPPAWGVSPKQKGEEGAPRERVHREEERTAFHLSDTVPASSASKNKAQNITAPESEAICWQLLSRCFRSWRHLVKRQREPAAAAVALGRWQLLRKCLQALWLREAQLEAAWGQYTKVLLVRSFREVSGLQVGPGGRVKQCPGSLREEEIAQRLLSHPRQRTDSRHERVQILQALQLAVFFLWCQQKKRARQERETLRKATRATQRTGSFPQAWHSTAAGVAWVAPLSPQHQRAWLCRCFGAWQQFVQRGSRYRDHLADRRTGTLRKCLEQWVRMKQLRESDGAKVTQLSLCRQKAGREAVYTAGPGACGLGAVGQAQGQQEQGRGSLQDACWTLALCWALLLWKMRLFQRQWANSFFQGLQQRMLQRSLRWWHLRALGPDATSSCTKTPSALEPLSSSTLQDSLEKVPRAPTLPDTLQGSLLWAAGQRQQGQCLLLWQARAQQFQGTARWYQHTRQRRIFLSWSRWATAQWAWRELASHRAWDRTCRAVLGLWRQRLLQSRLVEWWAQERGWRLARDALCHWHSCWQGQQFLHEKCQTWVQVHLQGLQKVVFRSWQQAAAHQRCTVTRPEQLLLQSYFQAWCEVVRDTGVLRAQHQAFQDGLRRRALGAVFATWREAQEVAAGAQEQRVAQASLARWRSCGQQGQEDGQQKKARAPQAFPAWPVAPGMHHEAQQQAGESAGAQAAQCWTWCWALWVHESCRGQVSRAHASWKPRAWVLEASVQSAVRGGVQRAILTQLRPAELRRFLRTVQLRVRLGLPGAGKTRSCWTQATELVPPAPSLQCSLGGRRKPRGTAWAQRCREHSLCPAFQLWPQWPGQSSWVPGLPLWTRDQGPRAHSSPEPRACKAQSKAHKRRLRILEKQAQAHGSALLLALKGHDALGHQEEVPAAPVPRGTASRAAGFPAGQVPGSGMAALGGCPRGRAAGADPAQGVAPEMGLADVVAADPATASGSAVTAAGRWAFKKWHQRLAARSPRRGAASSPRPWSKPGPKGPESGQEAARAPRGWGLGAEHGAQLQL

SEQ ID NO: 2488 - protein, 725 aa, Homo sapiens
MGTRKKVHAFVRVKPTDDFAHEMIRYGDDKRSIDIHLKKDIRRGVVNNQQTDWSFKLDGVLHDASQDLVYETVAKDVVSQALDGYNGTIMCYGQTGAGKTYTMMGATENYKHRGILPRALQQVFRMIEERPTHAITVRVSYLEIYNESLFDLLSTLPYVGPSVTPMTIVENPQGVFIKGLSVHLTSQEEDAFSLLFEGETNRIIASHTMNKNSSRSHCIFTIYLEAHSRTLSEEKYITSKINLVDLAGSERLGKSGSEGQVLKEATYINKSLSFLEQAIIALGDQKRDHIPFRQCKLTHALKDSLGGNCNMVLVTNIYGEAAQLEETLSSLRFASRMKLVTTEPAINEKYDAERMVKNLEKELALLKQELAIHDSLTNRTFVTYDPMDEIQIAEINSQVRRYLEGTLDEIDIISLRQIKEVFNQFRVVLSQQEQEVESTLRRKYTLIDRNDFAAISAIQKAGLVDVDGHLVGEPEGQNFGLGVAPFSTKPGKKAKSKKTFKEPLRPDTPPSKPVAFEEFKNEQGSEINRIFKENKSILNERRKRASETTQHINAIKREIDVTKEALNFQKSLREKQGKYENKGLMIIDEEEFLLILKLKDLKKQYRSEYQDLRDLRAEIQYCQHLVDQCRHRLLMEFDIWYNESFVIPEDMQMALKPGGSIRPGMVPVNRIVSLGEDDQDKFSQLQQRVLPEGPDSISFYNAKVKIEQKHNYLKTMMGLQQAHRK

SEQ ID NO: 2489 - protein, 369 aa, Homo sapiens
MEFLERTYLVNDKAAKMYAFTLESVELQQKPVNKDQCPRERPEELESGGMYHCHSGSKPTEKGANEYAYAKWKLCSASAICFIFMIAEVVGGHIAGSLAVVTDAAHLLIDLTSFLLSLFSLWLSSKPPSKRLTFGWHRAEILGALLSILCIWVVTGVLVYLACERLLYPDYQIQATVMIIVSSCAVAANIVLTVVLHQRCLGHNHKEVQANASVRAAFVHALGDLFQSISVLISALIIYFKPEYKIADPICTFIFSILVLASTITILKDFSILLMEGVPKSLNYSGVKELILAVDGVLSVHSLHIWSLTMNQVILSAHVATAASRDSQVVRREIAKALSKSFTMHSLTIQMESPVDQDPDCLFCEDPCD

SEQ ID NO: 2490 - protein, 2265 aa, Homo sapiens
MLRGPGPGLLLLAVQCLGTAVPSTGASKSKRQAQQMVQPQSPVAVSQSKPGCYDNGKHYQINQQWERTYLGNALVCTCYGGSRGFNCESKPEAEETCFDKYTGNTYRVGDTYERPKDSMIWDCTCIGAGRGRISCTIANRCHEGGQSYKIGDTWRRPHETGGYMLECVCLGNGKGEWTCKPIAEKCFDHAAGTSYVVGETWEKPYQGWMMVDCTCLGEGSGRITCTSRNRCNDQDTRTSYRIGDTWSKKDNRGNLLQCICTGNGRGEWKCERHTSVQTTSSGSGPFTDVRAAVYQPQPHPQPPPYGHCVTDSGVVYSVGMQWLKTQGNKQMLCTCLGNGVSCQETAVTQTYGGNSNGEPCVLPFTYNGRTFYSCTTEGRQDGHLWCSTTSNYEQDQKYSFCTDHTVLVQTRGGNSNGALCHFPFLYNNHNYTDCTSEGRRDNMKWCGTTQNYDADQKFGFCPMAAHEEICTTNEGVMYRIGDQWDKQHDMGHMMRCTCVGNGRGEWTCIAYSQLRDQCIVDDITYNVNDTFHKRHEEGHMLNCTCFGQGRGRWKCDPVDQCQDSETGTFYQIGDSWEKYVHGVRYQCYCYGRGIGEWHCQPLQTYPSSSGPVEVFITETPSQPNSHPIQWNAPQPSHISKYILRWRPKNSVGRWKEATIPGHLNSYTIKGLKPGVVYEGQLISIQQYGHQEVTRFDFTTTSTSTPVTSNTVTGETTPFSPLVATSESVTEITASSFVVSWVSASDTVSGFRVEYELSEEGDEPQYLDLPSTATSVNIPDLLPGRKYIVNVYQISEDGEQSLILSTSQTTAPDAPPDTTVDQVDDTSIVVRWSRPQAPITGYRIVYSPSVEGSSTELNLPETANSVTLSDLQPGVQYNITIYAVEENQESTPVVIQQETTGTPRSDTVPSPRDLQFVEVTDVKVTIMWTPPESAVTGYRVDVIPVNLPGEHGQRLPISRNTFAEVTGLSPGVTYYFKVFAVSHGRESKPLTAQQTTKLDAPTNLQFVNETDSTVLVRWTPPRAQITGYRLTVGLTRRGQPRQYNVGPSVSKYPLRNLQPASEYTVSLVAIKGNQESPKATGVFTTLQPGSSIPPYNTEVTETTIVITWTPAPRIGFKLGVRPSQGGEAPREVTSDSGSIVVSGLTPGVEYVYTIQVLRDGQERDAPIVNKVVTPLSPPTNLHLEANPDTGVLTVSWERSTTPDITGYRITTTPTNGQQGNSLEEVVHADQSSCTFDNLSPGLEYNVSVYTVKDDKESVPISDTIIPAVPPPTDLRFTNIGPDTMRVTWAPPPSIDLTNFLVRYSPVKNEEDVAELSISPSDNAVVLTNLLPGTEYVVSVSSVYEQHESTPLRGRQKTGLDSPTGIDFSDITANSFTVHWIAPRATITGYRIRHHPEHFSGRPREDRVPHSRNSITLTNLTPGTEYVVSIVALNGREESPLLIGQQSTVSDVPRDLEVVAATPTSLLISWDAPAVTVRYYRITYGETGGNSPVQEFTVPGSKSTATISGLKPGVDYTITVYAVTGRGDSPASSKPISINYRTEIDKPSQMQVTDVQDNSISVKWLPSSSPVTGYRVTTTPKNGPGPTKTKTAGPDQTEMTIEGLQPTVEYVVSVYAQNPSGESQPLVQTAVTTIPAPTDLKFTQVTPTSLSAQWTPPNVQLTGYRVRVTPKEKTGPMKEINLAPDSSSVVVSGLMVATKYEVSVYALKDTLTSRPAQGVVTTLENVSPPRRARVTDATETTITISWRTKTETITGFQVDAVPANGQTPIQRTIKPDVRSYTITGLQPGTDYKIYLYTLNDNARSSPVVIDASTAIDAPSNLRFLATTPNSLLVSWQPPRARITGYIIKYEKPGSPPREVVPRPRPGVTEATITGLEPGTEYTIYVIALKNNQKSEPLIGRKKTDELPQLVTLPHPNLHGPEILDVPSTVQKTPFVTHPGYDTGNGIQLPGTSGQQPSVGQQMIFEEHGFRRTTPPTTATPIRHRPRPYPPNVGQEALSQTTISWAPFQDTSEYIISCHPVGTDEEPLQFRVPGTSTSATLTGLTRGATYNVIVEALKDQQRHKVREEVVTVGNSVNEGLNQPTDDSCFDPYTVSHYAVGDEWERMSESGFKLLCQCLGFGSGHFRCDSSRWCHDNGVNYKIGEKWDRQGENGQMMSCTCLGNGKGEFKCDPHEATCYDDGKTYHVGEQWQKEYLGAICSCTCFGGQRGWRCDNCRRPGGEPSPEGTTGQSYNQYSQRYHQRTNTNVNCPIECFMPLDVQADREDSRE

SEQ ID NO: 2491 - protein, 97 aa, Homo sapiens
MKKKLVVLGLLAVVLVLVIVGLCLWLPSASKEPDNHVYTRAAVAADAKQCSKIGRDALRDGGSAVDAAIAALLCVGLMNAHSMGIGGGLFLTIYNST

SEQ ID NO: 2492 - protein, 324 aa, Homo sapiens
MSPAAAAEPDGDQQDRHVSKLIFCFFVFGAVLLCVGVLLSIFGFQACQYKPLPDCPMVLKVAGPACAVVGLGAVILARSRAQLQLRAGLQRGQQMDPDRAFICGESRQFAQCLIFGFLFLTSGMLISVLGIWVPGCGSNWAQEPLNETDTGDSEPRMCGFLSLQIMGPLIVLVGLCFFVVAHVKKRNTLNAGQDASEREEGQIQIMEPVQVTVGDSVIIFPPPPPPYFPESSASAVAESPGTNSLLPNENPPSYYSIFNYGRTPTSEGAASERDCESIYTISGTNSSSEASHTPHLPSELPPRYEEKENAAATFLPLSSEPSPP

SEQ ID NO: 2493 - protein, 451 aa, Homo sapiens
PPTLCCLKLAFIDPATGKLMDKSFSIRYHDMPDVIDFLVLRQFYDEARQRNWQSCDRFRSIIDDAWWFGTVLSQEPYQPQYPDSHFQCYIVRWDNTEIEKLSPWDMEPIPDNVDPPEELGASISVTTDELEKLLYKPQAGEWGQKSRDEECDRIISGIDQLLNLDIAAAFAGPVDLCTYPKYCTVVAYPTDLYTIRMRLVNRFYRRLSALVWEVRYIEHNARTFNEPESVIARSAKKITDQLLKFIKNQHCTNISELSNTSENDEQNAEDLDDSDLPKTSSGRRRDYRDIIDTPMDFGTVRETLDAGNYDSPLEFCKDIRLIFSNAKAYTPNKRSKIYSMTLRLSALFEEKMKKISSDFKIGQKFNEKLRRSQRFKQRQNCKGDSQPNKSIRNLKPKRLKSQTKIIPELVGSPTQSTSSRTAYLGTHKTSAGISSGVTSGDSSDSAESSER

SEQ ID NO: 2494 - protein, 166 aa, Homo sapiens
MGRPLLLPLLPLLLPPAFLQPSGSTGSGPSYLYGVTQPKHLSASMGGSVEIPFSFYYPWELATAPDVRISWRRGHFHRQSFYSTRPPSIHKDYVNRLFLNWTEGQKSGFLRISNLQKQDQSVYFCRVELDTRSSGRQQWQSIEGTKLSITQGQQRTKATTPAREPF

SEQ ID NO: 2495 - protein, 217 aa, Homo sapiens
MANLGCWMLVLFVATWSDLGLCKKRPKPGGWNTGGSRYPGQGSPGGNRYPPQGGGGWGQPHGGGWGQPHGGGWGQPHGGGWGQPHGGGWGQGGGTHSQWNKPSKPKTNMKHMAGAAAAGAVVGGLGGYMLGSAMSRPIIHFGSDYEDRYYRENMHRYPNQVYYRPMDEYSNQNNFVHDCVNITIKQHTVTTTTKGENFTETDVKMMERVVEQMCITQ

SEQ ID NO: 2496 - protein, 203 aa, Homo sapiens
MGIKTALPAAELGLYSLVLSGALAYAGRGLLEASQDGAHRKAFRESVRPGWEYIGRKMDVADFEWVMWFTSFRNVIIFALSGHVLFAKLCTMVAPKLRSWMYAVYGALAVMGTMGPWYLLLLLGHCVGLYVASLLGQPWLCLGLGLASLASFKMDPLISWQSGFVTGTFDLQEVLFHGGSSFTVLRCTSFALESCAHPDRHYS

SEQ ID NO: 2497 - protein, 294 aa, Homo sapiens
MPSAGLCSCWGGRVLPLLLAYVCYLLLGATIFQLLERQAEAQSRDQFQLEKLRFLENYTCLDQWAMEQFVQVIMEAWVKGVNPKGNSTNPSNWDFGSSFFFAGTVVTTIGYGNLAPSTEAGQVFCVFYALLGIPLNVIFLNHLGTGLRAHLAAIERWEDRPRRSQVLQVLGLALFLTLGTLVILIFPPMVFSHVEGWSFSEGFYFAFITLSTIGFGDYVVGTDPSKHYISVYRSLAAIWILLGLAWLALILPLGPLLLHRCCQLWLLSRGLGVKDGAASDPSGLPRPQKIPISA

SEQ ID NO: 2498 - protein, 372 aa, Homo sapiens
MSSKYPRSVRRCLPLCALTLEAALILLFYFFTHYDASLEDQKGLVASYQVGQDLTVMAALGLGFLTSNFRRHSWSSVAFNLFMLALGVQWAILLDGFLSQFPPGKVVITLFSIRLATMSAMSVLISAGAVLGKVNLAQLVVMVLVEVTALGTLRMVISNIFNTDYHMNLRHFYVFAAYFGLTVAWCLPKPLPKGTEDNDQRATIPSLSAMLGALFLWMFWPSVNSALLRSPIQRKNAMFNTYYALAVSVVTAISGSSLAHPQRKISMTYVHSAVLAGGVAVGTSCHLIPSPWLAMVLGLVAGLISIGGAKCLPVCCNRVLGIHHISVMHSIFSLLGLLGEITYIVLLVLHTVWNGNGMFAPKSQNMESTSCG

SEQ ID NO: 2499 - protein, 1247 aa, Homo sapiens
MSLFLRVVFSFTMFGDLFEEEYSTVSNNQYGKGKKLKTKALEPPAPREFTNLSGIRNQGGTCYLNSLLQTLHFTPEFREALFSLGPEELGLFEDKDKPDAKVRIIPLQLQRLFAQLLLLDQEAASTADLTDSFGWTSNEEMRQHDVQELNRILFSALETSLVGTSGHDLIYRLYHGTIVNQIVCKECKNVSERQEDFLDLTVAVKNVSGLEDALWNMYVEEEVFDCDNLYHCGTCDRLVKAAKSAKLRKLPPFLTVSLLRFNFDFVKCERYKETSCYTFPLRINLKPFCEQSELDDLEYIYDLFSVIIHKGGCYGGHYHVYIKDVDHLGNWQFQEEKSKPDVNLKDLQSEEEIDHPLMILKAILLEENNLIPVDQLGQKLLKKIGISWNKKYRKQHGPLRKFLQLHSQIFLLSSDESTVRLLKNSSLQAESDFQRNDQQIFKMLPPESPGLNNSISCPHWFDINDSKVQPIREKDIEQQFQGKESAYMLFYRKSQLQRPPEARANPRYGVPCHLLNEMDAANIELQTKRAECDSANNTFELHLHLGPQYHFFNGALHPVVSQTESVWDLTFDKRKTLGDLRQSIFQLLEFWEGDMVLSVAKLVPAGLHIYQSLGGDELTLCETEIADGEDIFVWNGVEVGGVHIQTGIDCEPLLLNVLHLDTSSDGEKCCQVIESPHVFPANAEVGTVLTALAIPAGVIFINSAGCPGGEGWTAIPKEDMRKTFREQGLRNGSSILIQDSHDDNSLLTKEEKWVTSMNEIDWLHVKNLCQLESEEKQVKISATVNTMVFDIRIKAIKELKLMKELADNSCLRPIDRNGKLLCPVPDSYTLKEAELKMGSSLGLCLGKAPSSSQLFLFFAMGSDVQPGTEMEIVVEETISVRDCLKLMLKKSGLQGDAWHLRKMDWCYEAGEPLCEEDATLKELLICSGDTLLLIEGQLPPLGFLKVPIWWYQLQGPSGHWESHQDQTNCTSSWGRVWRATSSQGASGNEPAQVSLLYLGDIEISEDATLAELKSQAMTLPPFLEFGVPSPAHLRAWTVERKRPGRLLRTDRQPLREYKLGRRIEICLEPLQKGENLGPQDVLLRTQVRIPGERTYAPALDLVWNAAQGGTAGSLRQRVADFYRLPVEKIEIAKYFPEKFEWLPISSWNQQITKRKKKKKQDYLQGAPYYLKDGDTIGVKNLLIDDDDDFSTIRDDTGKEKQKQRALGRRKSQEALHEQSSYILSSAETPARPRAPETSLSIHVGSFR

SEQ ID NO: 2500 - protein, 563 aa, Homo sapiens
MTVLEITLAVILTLLGLAILAILLTRWARCKQSEMYISRYSSEQSARLLDYEDGRGSRHAYSTQSDTSYDNRERSKRDYTPSTNSLVSMASKFSLGQTELILLLMCFILALSRSSIGSIKCLQTTEEPPSRTAGAMMQFTAPIPGATGPIKLSQKTIVQTPGPIVQYPGSNAGPPSAPRGPPMAPIIISQRTARIPQVHTMDSSGKITLTPVVILTGYMDEELAKKSCSKIQILKCGGTARSQNSREENKEALKNDIIFTNSVESLKSAHIKEPEREGKGTDLEKDKIGMEVKVDSDAGIPKRQETQLKISEMSIPQGQGAQIKKSVSDVPRGQESQVKKSESGVPKGQEAQVTKSGLVVLKGQEAQVEKSEMGVPRRQESQVKKSQSGVSKGQEAQVKKRESVVLKGQEAQVEKSELKVPKGQEGQVEKTEADVPKEQEVQEKKSEAGVLKGPESQVKNTEVSVPETLESQVKKSESGVLKGQEAQEKKESFEDKGNNDKEKERDAEKDPNKKEKGDKNTKGDKGKDKVKGKRESEINGEKSKGSKRAKANTGRKYNKKVEE

SEQ ID NO: 2501 - protein, 287 aa, Homo sapiens
MAEKILEKLDVLDKQAEIILARRTKINRLQSEGRKTTMAIPLTFDFQLEFEEALATSASKAISKIKEDKSCSITKSKMHVSFKCEPEPRKSNFEKSNLRPFFIQTNVKNKESESTEPVEEHLKSRSIRPYLYLKDTTEMENAGPLNVLYSQHRQACRRSLGSTDFSPMFNIQSNAHKKEKDSTLFTAQIEKKPRKPLDSVGLLEGDRNKRKKSPQMNDFNIKENKSVRNYQLSKYRSVRKKSLLPLCFEDELKNPHAKIVNVSPTKTVTSHMEQKDTNPIIFHDTEY

SEQ ID NO: 2502 - protein, 127 aa, Homo sapiens
MKKKLVVLGLLAVVLVLVIVGLCLWLPSASKEPDNHVYTRAAVAADAKQCSKIGRDALRDGGSAVDAAIAALLCVGLMNAHSMGIGGGLFLTIYNSTTRKAEVINAREVAPRLAFATMFNSSEQSQK

SEQ ID NO: 2503 - protein, 141 aa, Homo sapiens
MYTPNAQYCQMRCTFHPRCLLFSFLPASSINDMEKRFGCFLKDSVTGTLPKVHRTGAVSGHSLKQCGHQISACHRDIYKGVDMRGVNFNVSKVSSVEECQKRCTSNIRCQFFSYATQTFHKAEYRNNCLLKYSPGGTPTAI

SEQ ID NO: 2504 - protein, 890 aa, Homo sapiens
MAFAWWPCLILALLSSLAASGFPRSPFRLLGKRSLPEGVANGIEVYSTKINSKVTSRFAHNVVTMRAVNRADTAKEVSFDVELPKTAFITNFTLTIDGVTYPGNVKEKEVAKKQYEKAVSQGKTAGLVKASGRKLEKFTVSVNVAAGSKVTFELTYEELLKRHKGKYEMYLKVQPKQLVKHFEIEVDIFEPQGISMLDAEASFITNDLLGSALTKSFSGKKGHVSFKPSLDQQRSCPTCTDSLLNGDFTITYDVNRESPGNVQIVNGYFVHFFAPQGLPVVPKNVAFVIDISGSMAGRKLEQTKEALLRILEDMQEEDYLNFILFSGDVSTWKEHLVQATPENLQEARTFVKSMEDKGMTNINDGLLRGISMLNKAREEHRIPERSTSIVIMLTDGDANVGESRPEKIQENVRNAIGGKFPLYNLGFGNNLNYNFLENMALENHGFARRIYEDSDADLQLQGFYEEVANPLLTGVEMEYPENAILDLTQNTYQHFYDGSEIVVAGRLVDEDMNSFKADVKGHGATNDLTFTEEVDMKEMEKALQERDYIFGNYIERLWAYLTIEQLLEKRKNAHGEEKENLTARALDLSLKYHFVTPLTSMVVTKPEDNEDERAIADKPGEDAEATPVSPAMSYLTSYQPPQNPYYYVDGDPHFIIQIPEKDDALCFNIDEAPGTVLRLIQDAVTGLTVNGQITGDKRGSPDSKTRKTYFGKLGIANAQMDFQVEVTTEKITLWNRAVPSTFSWLDTVTVTQDGLSMMINRKNMVVSFGDGVTFVVVLHQVWKKHPVHRDFLGFYVVDSHRMSAQTHGLLGQFFQPFDFKVSDIRPGSDPTKPDATLVVKNHQLIVTRGSQKDYRKDASIGTKVVCWFVHNNGEGLIDGVHTDYIVPNLF

SEQ ID NO: 2505 - protein, 689 aa, Homo sapiens
MKPVHERSQECLPPKKRDLPVTSEDMGRTTSCSTNHTPSSDASEWSRGVVVAGQSQAGARVSLGGDGAEAITGLTVDQYGMLYKVAVPPATFSPTGLPSVVNMSPLPPTFNVASSLIQHPGIHYPPLHYAQLPSTSLQFIGSPYSLPYAVPPNFLPSPLLSPSANLATSHLPHFVPYASLLAEGATPPPQAPSPAHSFNKAPSATSPSGQLPHHSSTQPLDLAPGRMPIYYQMSRLPAGYTLHETPPAGASPVLTPQESQSALEAAAANGGQRPRERNLVRRESEALDSPNSKGEGQGLVPVVECVVDGQLFSGSQTPRVEVAAPAHRGTPDTDLEVQRVVGALASQDYRVVAAQRKEEPSPLNLSHHTPDHQGEGRGSARNPAELAEKSQARGFYPQSHQEPVKHRPLPKAMVVANGNLVPTGTDSGLLPVGSEILVASSLDVQARATFPDKEPTPPPITSSHLPSHFMKGAIIQLATGELKRVEDLQTQDFVRSAEVSGGLKIDSSTVVDIQESQWPGFVMLHFVVGEQQSKVSIEVPPEHPFFVYGQGWSSCSPGRTTQLFSLPCHRLQVGDVCISISLQSLNSNSVSQASCAPPSQLGPPRERPERTVLGSRELCDSEGKSQPAGEGSRVVEPSQPESGAQACWPAPSFQRYSMQGEEARAALLRPSFIPQEVKLSIEGRSNAGK

SEQ ID NO: 2506 - protein, 669 aa, Homo sapiens
CNTECLYRQTFQAFSEMLQSLVVKDPHLENLDTIIKLPLRFQRLGHLVALMALLCGDPQEKVAEEAAEGIHSLLHITLRLKYITHDKKDQQNLKRALTKCREFLELHSSAAKCFYNCPFRIAQVPEIMGVICAQLSIISQPRVRQQIINTVSLFISRPKYTDIVLSFLLCHPVPYNRHLAEVWRMLSVELPSTTWILWRLLRKLQKCHNEPAQEKMAYVAVAATDALYEVFLGNRLRAATFRLFPQLLMTLLIQIHHSIGLTMSDVDIPSGLYTEQEVPSEVTPLCFAMQATKTLLLRTCCLQEFNIMEKNKGWALLGGKDGHLQGLFLLANALLERNQLLAQKVMYLLVPLLNRGNDKHKLTSAGFFVELLRSPVAKRLPSIYSVARFKDWLQDGNHLFRILGLRGLYNLVGHQEMREDIKSLLPYIVDSLRETDEKIVLSAIQILLQLVRTMDFTTLAAMMRTLFSLFGDVRSDVHRFSVTLFGAAIKSVKNPDKKSIENQVLDSLVPLLLYSQDENDAVAEESRQVLTICAQFLKWKLPQEVYSKDPWHIKPTEAGTICRFFEKKCKGKINILEQTLMYSKNPKLPIRRSAVLFVGLLSKYMDHNELRRMGTDWIEDDLRDLLCDPEPSLCIIASQTLLLVQMARAEPKPKQRVNWLQKLMGRSSA

SEQ ID NO: 2507 - protein, 1015 aa, Homo sapiens
MLTALAPPALPGIPRQLPTAPARRQDSSGSSGSYYTAPGSPEPPDVGPDAKGPANWPWVAPGRGAGAQPRLSVSAQNSRQRHGPGSGFPRGPGSGPRPPQPQLRTLPSGEMEVIFGVGPLFGCSGADDREAQQQFTEPAFISPLPPGPASPAAVPRQSQVPDGGSRWATYLELRPRGPSPAAPAQFECVEVALEEGAAPARPRTVPKRQIELRPRPQSPPRAAGAPRPRLLLRTGSLDESLGPLQAAAGFVQTALARKLSPEAPAPSSATFGSTGRSEPETRETARSTHVVLEKAKSRPLRVRDNSAPAKAPRPWPSLRERAIRRDKPAPGTEPLGPVSSSIFLQSEEKIQEARKTRFPREAPDRTVQRARSPPFECRIPSEVPSRAVRPRSPSPPRQTPNGAVRGPRCPSPQNLSPWDRTTRRVSSPLFPEASSEWENQNPAVEETVSRRSPSPPILSQWNQCVAGERSPSLEAPSLWEIPHSAVADAVEPRSSPSPPAFFPWEAPDRPIGTWGPSPQETWDPMGPGSSIAFTQEAQNGLTQEELAPPTPSAPGTPEPTEMQSPSTREISDLAFGGSQQSPEVAAPEPPGSHPVGTLDADKCPEVLGPGEAASGRPRMAIPRPRDVRKLVKTTYAPGFPAGAQGSGLPAPPADPCGEEGGESKTQEPPALGPPAPAHYTSVFIKDFLPVVPHPYEPPEPSFDTVARDASQPNGVLRRRAENSTAKPFKRTEIRLPGALALGRRPEVTSRVRARGPGGENRDVEAQRLVPDGDGRTSPLGGARSSSQRSPVGPAGVRSPRPGSPQMQASPSPGIAPKPKTPPTAPEPAAAVQAPLPREPLALAGRTAPAQPRAASAPPTDRSPQSPSQGARRQPGAAPLGKVLVDPESGRYYFVEAPRQPRLRVLFDPESGQYVEVLLPPSSPGPPHRVYTPLALGLGLYPPAYGPIPSLSLPPSPGPQALGSPQLPWVSEAGPLDGTYYLPVSGTPNPAPPLLLCAPPSSSGPTQPGKGSLFPL

SEQ ID NO: 2508 - protein, 234 aa, Homo sapiens
LVEDTFTIDEVSEVLNGLQAVVHSEVESELINTAYTNVLLLRQLFAQAEKWYLKLQTDISELENRELLEQVAEFEKAEITSSNKKPILDVTKPKLAPLNEGGTAELLNKATNALDEKSKLEKALQDLQLDQGNQKDFIKAQDLSNLENTVAALKSEFQKTLNDKTENQKSLEENLATAKHDLLRVQEQLHMAEKELEKKFQQTAAYRNMKEILTKKNDQIKDLRKRLAQYEPED

SEQ ID NO: 2509 - protein, 1088 aa, Homo sapiens
MDFLRLYLPGLHQALRGALDSLGTFVSYLLGDAVPTVEREAQAAEELGVVAVGKTGKIVEEEAQEDLEGLRGSQNEGAGRLRGPGDDRRHEVGSSAVEQTWGWGDGSSHGSQAERQDSGAGETAKAARCQEPSAHLEARKKSKAGSGACQDRSGQAQERQESHEQEVNREERLRSWEQEEEEEEVRAREPGMARGAESEWTWHGETEGKAGAVGPKAAGDNREMEQGVREADAGETEEPGAEGAGKGEEVVVVEKACESTRAWGTWGPGAEPEDWGILGREEARTTPGREEARAILDGEEARTISGGEEAETASGGEEAETASGGEEAGTASGGEEAGIASGGEAGTASGGEEAGTASGGDEAWTTSGKEEADLLGVRQTEYGAVPGERLLEATGKVWVLEEEGDEEREAEVSPFPKQPQVLGTERTEEAAESQTAGREAVGGQEAGESFEGQVDLRGKEAEMRQDLGIRADRARMEELVQAEEAQEERGSSRDPVAELPSDGEAEGTADLEATPEARPEEELTGEESEAAQTSCGLLGVEWGGLTHSVTKGQGPELMGGAQTPTKQPEEREAGEVELMGVLALSKEEQERSLEAGPRHAGSVKPEASEAFPGAWENRTRKDMERGNTQEDAADGEQREEEETAGGQTLAAEAEGDRESELSEVPEAGGEGLTTQDAGCGTEEGEASVSENQELDGSTGADAGPCPSLGEAYARETEDEEAEADRTSRRGWRLQAVAVGLPDREDAQTGSVAAGIMGGDVVPHISAAGAGEALEGVLGQGWDSKEKEEAAAGEHAGGQEFGLEGSAEEEVTGRGSQVEAFESREGGPWGGRVEAEESAGAEDSCGLDPAGSQTARAEGMGAMVEAGGLLEKWTLLEEEAVGWQEREQREDSEGRCGDYHPEGEAPRLLDAEGLMVTGGRRAEAKETEPESLEHVRGQEEQPTHQAPAEAAPESVGEAETAEAMGSARGGAANSWSEAPLPGSLLDVSVPRSRVHLSRSSSQRRSRPSFRRTPAWEQQEEPPAPNPPEEELSAPEQRPLQLEEPLEPSPLRHDGTPVPARRRPLGHGFGLAHPGMMQELQARLGRPKPQ

SEQ ID NO: 2510 - protein, 847 aa, Homo sapiens
MSFSEMNRRTLAFRGGGLVTASGGGSTNNNAGGEASAWPPQPQPRQPPPPAPPALQPPNGRGADEEVELEGLEPQDLEASAGPAAGAAEEAKELLLPQDAGGPTSLGGGAGGPLLAERNRRTLAFRGGGGGGLGNNGSSRGRPETSVWPLRHFNGRGPATVDLELDALEGKELMQDGASLSDSTEDEEEGASLGDGSGAEGGSCSSSRRSGGDGGDEVEGSGVGAGEGETVQHFPLARPKSLMQKLQCSFQTSWLKDFPWLRYSKDTGLMSCGWCQKTPADGGSVDLPPVGHDELSRGTRNYKKTLLLRHHVSTEHKLHEANAQESEIPSEEGYCDFNSRPNENSYCYQLLRQLNEQRKKGILCDVSIVVSGKIFKAHKNILVAGSRFFKTLYCFSNKESPNQNNTTHLDIAAVQGFSVILDFLYSGNLVLTSQNAIEVMTVASYLQMSEVVQTCRNFIKDALNISIKSEAPESVVVDYNNRKPVNRDGLSSSRDQKIASFWATRNLTNLASNVKIENDGCNVDEGQIENYQMNDSSWVQDGSPEMAENESEGQTKVFIWNNMGSQGIQETGKTRRKNQTTKRFIYNIPPNNETNLEDCSVMQPPVAYPEENTLLIKEEPDLDGALLSGPDGDRNVNANLLAEAGTSQDGGDAGTSHDFKYGLMPGASNDFKYGLLPESWPKQETWENGESSLIMNKLKCPHCSYVAKYRRTLKRHLLIHTGVRSFSCDICGKLFTRREHVKRHSLVHKKDKKYKCMVCKKIFMLAASVGIRHGSRRYGVCVDCADKSQPGGQEGVDQGQDTEFPRDEEYEENEVGEADEELVDDGEDQNDPSRWDESGEVCMSLDD

SEQ ID NO: 2511 - protein, 147 aa, Homo sapiens
MGETEKRIETHRIRCLSKLKMFLLAITCAFVSKTLSGSYMNSMLTQIERQFNIPTSLVGFINGSFEIGNLLLIIFVSYFGTKLHRPIMIGIGCVVMGLGCFLKSLPHFLMNQYEYESTVSVSGNLSSNSFLCMENGTQILRPTQDPS

SEQ ID NO: 2512 - protein, 162 aa, Homo sapiens
MKVTLSALDTSESSFTPLVVIELAQDVKEETKEWLKNRIIAKKKDGVRRLLTSGIVIQVFPLHDSEALKKLEDTWYTRFALKYQPIDSIRGYFGETIALYFGFLEYFTFALIPMAVIGLPYYLFVWEDYDKYVIFASFNLIWSTVILELWKRGCANMTYRWG

SEQ ID NO: 2513 - protein, 351 aa, Homo sapiens
MGVTPHHVCRPPGNVSQVVFHNHSNWSLEDTGALLSSGQKDYVTVQLQNGEIWELSRCSRNKRENTSSLGYEYTGSKKEFPCVDGYIYDQNTWKSTAVTQWNLVCDRKWLAMLIQPLFMFGVLLGSVTFGYFSDRLGRRVVLWATSSSMFLFGIAAAFAVDYYTFMAARFFLAMVASGYLVVGFVYVMEFIGMKSRTWASVHLHSFFAVGTLLVALTGYLVRTWWLYQMILSTVTVPFILCCWVLPETPFWLLSEGRYEEAQKIVDIMAKWNRASSCKLSELLSLDLQGPVSNSPTEVQKHNLSYLFYNWSITKRTLTVWLIWFTGSLGFYSFSLNSVNLGGNEYLNLFLL

SEQ ID NO: 2514 - protein, 329 aa, Homo sapiens
MAEAATPGTTATTSGAGAAAATAAAASPTPIPTVTAPSLGAGGGGGGSDGSGGGWTKQVTCRYFMHGVCKEGDNCRYSHDLSDSPYSVVCKYFQRGYCIYGDRCRYEHSKPLKQEEATATELTTKSSLAASSSLSSIVGPLVEMNTGEAESRNSNFATVGAGSEDWVNAIEFVPGQPYCGRTAPSCTEAPLQGSVTKEESEKEQTAVETKKQLCPYAAVGECRYGENCVYLHGDSCDMCGLQVLHPMDAAQRSQHIKSCIEAHEKDMELSFAVQRSKDMVCGICMEVVYEKANPSERRFGILSNCNHTYCLKCIRKWRSAKQFESKIIK

SEQ ID NO: 2515 - protein, 302 aa, Homo sapiens
MELRSYQWEVIMPALEGKNIIIWLPTGAGKTRAAAYVAKRHLETVDGAKVVVLVNRVHLVTQHGEEFRRMLDGRWTVTTLSGDMGPRAGFGHLARCHDLLICTAELLQMALTSPEEEEHVELTVFSLIVVDECHHTHKDTVYNVIMSQYLELKLQRAQPLPQVLGLTASPGTGGASKLDGAINHVLQLCANLDTWCIMSPQNCCPQLQEHSQQPCKQYNLCHRRSQDPFGDLLKKLMDQIHDHLEMPELSRKFGTQMYEQQVVKLSEAAALAGLQEQRVYALHLRRYNDALLIHDTVRAVDA

SEQ ID NO: 2516 - protein, 639 aa, Homo sapiens
MNRKDSKRKSHQECTGKIGGRGRPRQVRRHKTCPSPREISKVMASMNLGLLSEGGCSEDELLEKCIQSFDSAGSLCHEDHMLNMVLAMHSWVLPSADLAARLLTSYQKATGDTQELRRLQICHLVRYWLMRHPEVMHQDPQLEEVIGRFWATVAREGNSAQRRLGDSSDLLSPGGPGPPLPMSSPGLGKKRKVSLLFDHLETGELAQHLTYLEFRSFQAITVMVLSRPGPLQRAQVLDKFIHVAQRLHQLQNFNTLMAVTGGLCHSAISRLKDSHAHLSPDSTKALLELTELLASHNNYARYRRTWAGCAGFRLPVLGVHLKDLVSLHEAQPDRLPDGRLHLPKLNNLYLRLQELVALQGQHPPCSANEDLLHLLTLSLDLFYTEDEIYELSYAREPRCPKSLPPSPFNAPLVVEWAPGVTPKPDRVTLGRHVEQLVESVFKNYDPEGRGTISQEDFERLSGNFPFACHGLHPPPRQGRGSFSREELTGYLLRASAICSKLGLAFLHTFHEVTFRKPTFCDSCSGFLWGVTKQGYRCRECGLCCHKHCRDQVKVECKKRPGAKGDAGPPGAPVPSTPAPHASCGSEENHSYTLSLEPETGCQLRHAWTQTESPHPSWETDTVPCPVMDPPSTASSKLDS

SEQ ID NO: 2517 - protein, 447 aa, Homo sapiens
MDHAEENEILAATQRYYVERPIFSHPVLQERLHTKDKVPDSIADKLKQAFTCTPKKIRNIIYMFLPITKWLPAYKFKEYVLGDLVSGISTGVLQLPQGLAFAMLAAVPPIFGLYSSFYPVIMYCFLGTSRHISIGPFAVISLMIGGVAVRLVPDDIVIPGGVNATNGTEARDALRVKVAMSVTLLSGIIQFCLGVCRFGFVAIYLTEPLVRGFTTAAAVHVFTSMLKYLFGVKTKRYSGIFSVVYSTVAVLQNVKNLNVCSLGVGLMVFGLLLGGKEFNERFKEKLPAPIPLEFFAVVMGTGISAGFNLKESYNVDVVGTLPLGLLPPANPDTSLFHLVYVDAIAIAIVGFSVTISMAKTLANKHGYQVDGNQELIALGLCNSIGSLFQTFSISCSLSRSLVQEGTGGKTQTIWLTTFVSSLFLGLDYGLITAVIIALLTVIYRTQR

SEQ ID NO: 2518 - protein, 764 aa, Homo sapiens
MGSNLSPQLCLMPFILGLLSGGVTTTPWSLARPQGSCSLEGVEIKGGSFRLLQEGQALEYVCPSGFYPYPVQTRTCRSTGSWSTLKTQDQKTVRKAECRAIHCPRPHDFENGEYWPRSPYYNVSDEISFHCYDGYTLRGSANRTCQVNGRWSGQTAICDNGAGYCSNPGIPIGTRKVGSQYRLEDSVTYHCSRGLTLRGSQRRTCQEGGSWSGTEPSCQDSFMYDTPQEVAEAFLSSLTETIEGVDAEDGHGPGEQQKRKIVLDPSGSMNIYLVLDGSDSIGASNFTGAKKCLVNLIEKVASYGVKPRYGLVTYATYPKIWVKVSEADSSNADWVTKQLNEINYEDHKLKSGTNTKKALQAVYSMMSWPDDVPPEGWNRTRHVIILMTDGLHNMGGDPITVIDEIRDLLYIGKDRKNPREDYLDVYVFGVGPLVNQVNINALASKKDNEQHVFKVKDMENLEDVFYQMIDESQSLSLCGMVWEHRKGTDYHKQPWQAKISVIRPSKGHESCMGAVVSEYFVLTAAHCFTVDDKEHSIKVSVGGEKRDLEIEVVLFHPNYNINGKKEAGIPEFYDYDVALIKLKNKLKYGQTIRPICLPCTEGTTRALRLPPTTTCQQQKEELLPAQDIKALFVSEEEKKLTRKEVYIKNGDKKGSCERDAQYAPGYDKVKDISEVVTPRFLCTGGVSPYADPNTCRGDSGGPLIVHKRSRFIQVGVISWGVVDVCKNQKRQKQVPAHARDFHINLFQVLPWLKEKLQDEDLGFL

SEQ ID NO: 2519 - protein, 8525 aa, Homo sapiens
MADDEDYEEVVEYYTEEVVYEEVPGETITKIYETTTTRTSDYEQSETSKPALAQPALAQPASAKPVERRKVIRKKVDPSKFMTPYIAHSQKMQDLFSPNKYKEKFEKTKGQPYASTTDTPELRRIKKVQDQLSEVKYRMDGDVAKTICHVDEKAKDIEHAKKVSQQVSKVLYKQNWEDTKDKYLLPPDAPELVQAVKNTAMFSKKLYTEDWEADKSLFYPYNDSPELRRVAQAQKALSDVAYKKGLAEQQAQFTPLADPPDIEFAKKVTNQVSKQKYKEDYENKIKGKWSETPCFEVANARMNADNISTRKYQEDFENMKDQIYFMQTETPEYKMNKKAGVAASKVKYKEDYEKNKGKADYNVLPASENPQLRQLKAAGDALSDKLYKENYEKTKAKSINYCETPKFKLDTVLQNFSSDKKYKDSYLKDILGHYVGSFEDPYHSHCMKVTAQNSDKNYKAEYEEDRGKGFFPQTITQEYEAIKKLDQCKDHTYKVHPDKTKFTQVTDSPVLLQAQVNSKQLSDLNYKAKHESEKFKCHIPPDTPAFIQHKVNAYNLSDNLYKQDWEKSKAKKFDIKVDAIPLLAAKANTKNTSDVMYKKDYEKNKGKMIGVLSINDDPKMLHSLKVAKNQSDRLYKENYEKTKAKSMNYCETPKYQLDTQLKNFSEARYKDLYVKDVLGHYVGSMEDPYHTHCMKVAAQNSDKSYKAEYEEDKGKCYFPQTITQEYEAIKKLDQCKDHTYKVHPDKTKFTAVTDSPVLLQAQLNTKQLSDLNYKAKHEGEKFKCHIPADAPQFIQHRVNAYNLSDNVYKQDWEKSKAKKFDIKVDAIPLLAAKANTKNTSDVMYKKDYEKSKGKMIGALSINDDPKMLHSLKTAKNQSDREYRKDYEKSKTIYTAPLDMLQVTQAKKSQAIASDVDYKHILHSYSYPPDSINVDLAKKAYALQSDVEYKADYNSWMKGCGWVPFGSLEMEKAKRASDILNEKKYRQHPDTLKFTSIEDAPITVQSKINQAQRSDIAYKAKGEEIIHKYNLPPDLPQFIQAKVNAYNISENMYKADLKDLSKKGYDLRTDAIPIRAAKAARQAASDVQYKKDYEKAKGKMVGFQSLQDDPKLVHYMNVAKIQSDREYKKDYEKTKSKYNTPHDMFNVVAAKKAQDVVSNVNYKHSLHHYTYLPDAMDLELSKNMMQIQSDNVYKEDYNNWMKGIGWIPIGSLDVEKVKKAGDALNEKKYRQHPDTLKFTSIVDSPVMVQAKQNTKQVSDILYKAKGEDVKHKYTMSPDLPQFLQAKCNAYNISDVCYKRDWYDLIAKGNNVLGDAIPITAAKASRNIASDYKYKEAYEKSKGKHVGFRSLQDDPKLVHYMNVAKLQSDREYKKNYENTKTSYHTPGDMVSITAAKMAQDVATNVNYKQPLHHYTYLPDAMSLEHTRNVNQIQSDNVYKDEYNSFLKGIGWIPIGSLEVEKVKKAGDALNERKYRQHPDTVKFTSVPDSMGMVLAQHNTKQLSDLNYKVEGEKLKHKYTIDPELPQFIQAKVNALNMSDAHYKADWKKTIAKGYDLRPDAIPIVAAKSSRNIASDCKYKEAYEKAKGKQVGFLSLQDDPKLVHYMNVAKIQSDREYKKGYEASKTKYHTPLDMVSVTAAKKSQEVATNANYRQSYHHYTLLPDALNVEHSRNAMQIQSDNLYKSDFTNWMKGIGWVPIESLEVEKAKKAGEILSEKKYRQHPEKLKFTYAMDTMEQALNKSNKLNMDKRLYTEKWNKDKTTIHVMPDTPDILLSRVNQITMSDKLYKAGWEEEKKKGYDLRPDAIAIKAARASRDIASDYKYKKAYEQAKGKHIGFRSLEDDPKLVHFMQVAKMQSDREYKKGYEKSKTSFHTPVDMLSVVAAKKSQEVATNANYRNVIHTYNMLPDAMSFELAKNMMQIQSDNQYKADYADFMKGIGWLPLGSLEAEKNKKAMEIISEKKYRQHPDTLKYSTLMDSMNMVLAQNNAKIMNEHLYKQAWEADKTKVHIMPDIPQIILAKANAINMSDKLYKLSLEESKKKGYDLRPDAIPIKAAKASRDIASDYKYKYNYEKGKGKMVGFRSLEDDPKLVHSMQVAKMQSDREYKKNYENTKTSYHTPADMLSVTAAKDAQANITNTNYKHLIHKYILLPDAMNIELTRNMNRIQSDNEYKQDYNEWYKGLGWSPAGSLEVEKAKKATEYASDQKYRQHPSNFQFKKLTDSMDMVLAKQNAHTMNKHLYTIDWNKDKTKIHVMPDTPDILQAKQNQTLYSQKLYKLGWEEALKKGYDLPVDAISVQLAKASRDIASDYKYKQGYRKQLGHHVGFRSLQDDPKLVLSMNVAKMQSEREYKKDFEKWKTKFSSPVDMLGVVLAKKCQELVSDVDYKNYLHQWTCLPDQNDVVQAKKVYELQSENLYKSDLEWLRGIGWSPLGSLEAEKNKRASEIISEKKYRQPPDRNKFTSIPDAMDIVLAKTNAKNRSDRLYREAWDKDKTQIHIMPDTPDIVLAKANLINTSDKLYRMGYEELKRKGYDLPVDAIPIKAAKASREIASEYKYKEGFRKQLGHHIGARNIEDDPKMMWSMHVAKIQSDREYKKDFEKWKTKFSSPVDMLGVVLAKKCQTLVSDVDYKNYLHQWTCLPDQSDVIHARQAYDLQSDNLYKSDLQWLKGIGWMTSGSLEDEKNKRATQILSDHVYRQHPDQFKFSSLMDSIPMVLAKNNAITMNHRLYTEAWDKDKTTVHIMPDTPEVLLAKQNKVNYSEKLYKLGLEEAKRKGYDMRVDAIPIKAAKASRDIASEFKYKEGYRKQLGHHIGARAIRDDPKMMWSMHVAKIQSDREYKKDFEKWKTKFSSPVDMLGVVLAKKCQTLVSDVDYKNYLHQWTCLPDQSDVIHARQAYDLQSDNMYKSDLQWMRGIGWVSIGSLDVEKCKRATEILSDKIYRQPPDRFKFTSVTDSLEQVLAKNNAITMNKRLYTEAWDKDKTQIHIMPDTPEIMLARMNKINYSESLYKLANEEAKKKGYDLRSDAIPIVAAKASRDIISDYKYKDGYCKQLGHHIGARNIEDDPKMMWSMHVAKIQSDREYKKDFEKWKTKFSSPVDMLGVVLAKKCQTLVSDVDYKNYLHEWTCLPDQSDVIHARQAYDLQSDNIYKSDLQWLRGIGWVPIGSMDVVKCKRATEILSDNIYRQPPDKLKFTSVTDSLEQVLAKNNALNMNKRLYTEAWDKDKTQIHIMPDTPEIMLARQNKINYSETLYKLANEEAKKKGYDLRSDAIPIVAAKASRDVISDYKYKDGYRKQLGHHIGARNIEDDPKMMWSMHVAKIQSDREYKKDFEKWKTKFSSPVDMLGVVLAKKCQTLVSDVDYKNYLHEWTCLPDQNDVIHARQAYDLQSDNIYKSDLQWLRGIGWVPIGSMDVVKCKRAAEILSDNIYRQPPDKLKFTSVTDSLEQVLAKNNALNMNKRLYTEAWDKDKTQVHIMPDTPEIMLARQNKINYSESLYRQAMEEAKKEGYDLRSDAIPIVAAKASRDIASDYKYKEAYRKQLGHHIGARAVHDDPKIMWSLHIAKVQSDREYKKDFEKYKTRYSSPVDMLGIVLAKKCQTLVSDVDYKHPLHEWICLPDQNDIIHARKAYDLQSDNLYKSDLEWMKGIGWVPIDSLEVVRAKRAGELLSDTIYRQRPETLKFTSITDTPEQVLAKNNALNMNKRLYTEAWDNDKKTIHVMPDTPEIMLAKLNRINYSDKLYKLALEESKKEGYDLRLDAIPIQAAKASRDIASDYKYKEGYRKQLGHHIGARNIKDDPKMMWSIHVAKIQSDREYKKEFEKWKTKFSSPVDMLGVVLAKKCQILVSDIDYKHPLHEWTCLPDQNDVIQARKAYDLQSDAIYKSDLEWLRGIGWVPIGSVEVEKVKRAGEILSDRKYRQPADQLKFTCITDTPEIVLAKNNALTMSKHLYTEAWDADKTSIHVMPDTPDILLAKSNSANISQKLYTKGWDESKMKDYDLRADAISIKSAKASRDIASDYKYKEAYEKQKGHHIGAQSIEDDPKIMCAIHAGKIQSEREYKKEFQKWKTKFSSPVDMLSILLAKKCQTLVTDIDYRNYLHEWTCMPDQNDIIQAKKAYDLQSDSVYKADLEWLRGIGWMPEGSVEMNRVKVAQDLVNERLYRTRPEALSFTSIVDTPEVVLAKANSLQISEKLYQEAWNKDKSNITIPSDTPEMLQAHINALQISNKLYQKDWNDAKQKGYDIRADAIEIKHAKASREIASEYKYKEGYRKQLGHHMGFRTLQDDPKSVWAIHAAKIQSDREYKKAYEKSKGIHNTPLDMMSIVQAKKCQVLVSDIDYRNYLHQWTCLPDQNDVIQAKKAYDLQSDNLYKSDLEWLKGIGWLPEGSVEVMRVKNAQNLLNERLYRIKPEALKFTSIVDTPEVIQAKINAVQISEPLYRDAWEKEKANVNVPADTPLMLQSKINALQISNKRYQQAWEDVKMTGYDLRADAIGIQHAKASRDIASDYLYKTAYEKQKGHYIGCRSAKEDPKLVWAANVLKMQNDRLYKKAYNDHKAKISIPVDMVSISAAKEGQALASDVDYRHYLHHWSCFPDQNDVIQARKAYDLQSDSVYKADLEWLRGIGWMPEGSVEMNRVKVAQDLVNERLYRTRPEALSFTSIVDTPEVVLAKANSLQISEKLYQEAWNKDKSNITIPSDTPEMLQAHINALQISNKLYQKDWNDTKQKGYDIRADAIEIKHAKASREIASEYKYKEGYRKQLGHHMGFRTLQDDPKSVWAIHAAKIQSDREYKKAYEKSKGIHNTPLDMMSIVQAKKCQVLVSDIDYRNYLHQWTCLPDQNDVIQAKKAYDLQSDNLYKSDLEWLKGIGWLPEGSVEVMRVKNAQNLLNERLYRIKPEALKFTSIVDTPEVIQAKINAVQISEPLYRNAWEKEKANVNVPADTPLMLQSKINALQISNKRYQQAWEDVKMTGYDLRADAIGIQHAKASRDIASDYLYKTAYEKQKGHYIGCRSAKEDPKLVWAANVLKMQNDRLYKKAYNDHKAKISIPVDMVSISAAKEGQALASDVDYRHYLHHWSCFPDQNDVIQARKAYDLQSDSVYKADLEWLRGIGWMPEGSVEMNRVKVAQDLVNERLYRTRPEALSFTSIVDTPEVVLAKANSLQISEKLYQEAWNKDKSNITIPSDTPEMLQAHINALQISNKLYQKDWNDTKQKGYDIRADAIEIKHAKASREIASEYKYKEGYRKQLGHHMGFRTLQDDPKSVWAIHAAKIQSDREYKKAYEKSKGIHNTPLDMMSIVQAKKCQVLVSDIDYRNYLHQWTCLPDQNDVIQAKKAYDLQSDNLYKSDLEWLKGIGWLPEGSVEVMRVKNAQNLLNERLYRIKPEALKFTSIVDTPEVIQAKINAVQISEPLYRDAWEKEKANVNVPADTPLMLQSKINALQISNKRYQQAWEDVKMTGYDLRADAIGIQHAKASRDIASDYLYKTAYEKQKGHYIGCRSAKEDPKLVWAANVLKMQNDRLYKKAYNDHKAKISIPVDMVSISAAKEGQALASDVDYRHYLHRWSCFPDQNDVIQARKAYDLQSDALYKADLEWLRGIGWMPQGSPEVLRVKNAQNIFCDSVYRTPVVNLKYTSIVDTPEVVLAKSNAENISIPKYREVWDKDKTSIHIMPDTPEINLARANALNVSNKLYREGWDEMKAGCDVRLDAIPIQAAKASREIASDYKYKLDHEKQKGHYVGTLTARDDNKIRWALIADKLQNEREYRLDWAKWKAKIQSPVDMLSILHSKNSQALVSDMDYRNYLHQWTCMPDQNDVIQAKKAYELQSDNVYKADLEWLRGIGWMPNDSVSVNHAKHAADIFSEKKYRTKIETLNFTPVDDRVDYVTAKQSGEILDDIKYRKDWNATKSKYTLTETPLLHTAQEAARILDQYLYKEGWERQKATGYILPPDAVPFVHAHHCNDVQSELKYKAEHVKQKGHYVGVPTMRDDPKLVWFEHAGQIQNERLYKEDYHKTKAKINIPADMVSVLAAKQGQTLVSDIDYRNYLHQWMCHPDQNDVIQARKAYDLQSDNVYRADLEWLRGIGWIPLDSVDHVRVTKNQEMMSQIKYKKNALENYPNFRSVVDPPEIVLAKINSVNQSDVKYKETFNKAKGKYTFSPDTPHISHSKDMGKLYSTILYKGAWEGTKAYGYTLDERYIPIVGAKHADLVNSELKYKETYEKQKGHYLAGKVIGEFPGVVHCLDFQKMRSALNYRKHYEDTKANVHIPNDMMNHVLAKRCQYILSDLEYRHYFHQWTSLLEEPNVIRVRNAQEILSDNVYKDDLNWLKGIGCYVWDTPQILHAKKSYDLQSQLQYTAAGKENLQNYNLVTDTPLYVTAVQSGINASEVKYKENYHQIKDKYTTVLETVDYDRTRNLKNLYSSNLYKEAWDRVKATSYILPSSTLSLTHAKNQKHLASHIKYREEYEKFKALYTLPRSVDDDPNTARCLRVGKLNIDRLYRSVYEKNKMKIHIVPDMVEMVTAKDSQKKVSEIDYRLRLHEWICHPDLQVNDHVRKVTDQISDIVYKDDLNWLKGIGCYVWDTPEILHAKHAYDLRDDIKYKAHMLKTRNDYKLVTDTPVYVQAVKSGKQLSDAVYHYDYVHSVRGKVAPTTKTVDLDRALHAYKLQSSNLYKTSLRTLPTGYRLPGDTPHFKHIKDTRYMSSYFKYKEAYEHTKAYGYTLGPKDVPFVHVRRVNNVTSERLYRELYHKLKDKIHTTPDTPEIRQVKKTQEAVSELIYKSDFFKMQGHMISLPYTPQVIHCRYVGDITSDIKYKEDLQVLKGFGCFLYDTPDMVRSRHLRKLWSNYLYTDKARKMRDKYKVVLDTPEYRKVQELKTHLSELVYRAAGKKQKSIFTSVPDTPDLLRAKRGQKLQSQYLYVELATKERPHHHAGNQTTALKHAKDVKDMVSEKKYKIQYEKMKDKYTPVPDTPILIRAKRAYWNASDLRYKETFQKTKGKYHTVKDALDIVYHRKVTDDISKIKYKENYMSQLGIWRSIPDRPEHFHHRAVTDTVSDVKYKEDLTWLKGIGCYAYDTPDFTLAEKNKTLYSKYKYKEVFERTKSDFKYVADSPINRHFKYATQLMNEKKYRADYEQRKDKYHLVVDEPRHLLAKTAGDQISQIKYRKNYEKSKDKFTSIVDTPEHLRTTKVNKQISDILYKLEYNKAKPRGYTTIHDTPMLLHVRKVKDEVSDLKYKEVYQRNKSNCTIEPDAVHIKAAKDAYKVNTNLDYKKQYEANKAHWKWTPDRPDFLQAAKSSLQQSDFEYKLDREFLKGCKLSVTDDKNTVLALRNTLIESDLKYKEKHVKERGTCHAVPDTPQILLAKTVSNLVSENKYKDHVKKHLAQGSYTTLPETRDTVHVKEVTKHVSDTNYKKKFVKEKGKSNYSIMLEPPEVKHAMEVAKKQSDVAYRKDAKENLHYTTVADRPDIKKATQAAKQASEVEYRAKHRKEGSHGLSMLGRPDIEMAKKAAKLSSQVKYRENFDKEKGKTPKYNPKDSQLYKVMKDANNLASEVKYKADLKKLHKPVTDMKESLIMNHVLNTSQLASSYQYKKKYEKSKGHYHTIPDNLEQLHLKEATELQSIVKYKEKYEKERGKPMLDFETPTYITAKESQQMQSGKEYRKDYEESIKGRNLTGLEVTPALLHVKYATKIASEKEYRKDLEESIRGKGLTEMEDTPDMLRAKNATQILNEKEYKRDLELEVKGRGLNAMANETPDFMRARNATDIASQIKYKQSAEMEKANFTSVVDTPEIIHAQQVKNLSSQKKYKEDAEKSMSYYETVLDTPEIQRVRENQKNFSLLQYQCDLKNSKGKITVVQDTPEILRVKENQKNFSSVLYKEDVSPGTAIGKTPEMMRVKQTQDHISSVKYKEAIGQGTPIPDLPEVKRVKETQKHISSVMYKENLGTGIPTTVTPEIERVKRNQENFSSVLYKENLGKGIPTPITPEMERVKRNQENFSSILYKENLSKGTPLPVTPEMERVKLNQENFSSVLYKENVGKGIPIPITPEMERVKHNQENFSSVLYKENLGTGIPIPITPEMQRVKHNQENLSSVLYKENMGKGTPLPVTPEMERVKHNQENISSVLYKENMGKGTPLPVTPEMERVKHNQENISSVLYKENMGKGTPLAVTPEMERVKHNQENISSVLYKENVGKATATPVTPEMQRVKRNQENISSVLYKENLGKATPTPFTPEMERVKRNQENFSSVLYKENMRKATPTPVTPEMERAKRNQENISSVLYSDSFRKQIQGKAAYVLDTPEMRRVRETQRHISTVKYHEDFEKHKGCFTPVVTDPITERVKKNMQDFSDINYRGIQRKVVEMEQKRNDQDQETITGLRVWRTNPGSVFDYDPAEDNIQSRSLHMINVQAQRRSREQSRSASALSISGGEEKSEHSEAPDHHLSTYSDGGVFAVSTAYKHAKTTELPQQRSSSVATQQTTVSSIPSHPSTAGKIFRAMYDYMAADADEVSFKDGDAIINVQAIDEGWMYGTVQRTGRTGMLPANYVEAI

SEQ ID NO: 2520 - protein, 136 aa, Homo sapiens
LHASSPYFTFTSHCVIPKEWHKASARARSKTYKYSPEKLIYADKKQKRKEKKTADLSQAAFERQFLSSKLSQKNKVGERKGLVLGTRQQRPRSWAAGDSQQHRGPQPVGKRVMTAEVLGQHLASLQKVARQGHPWY

SEQ ID NO: 2521 - protein, 244 aa, Homo sapiens
MTEPGASPEDPWVKVEYAYSDNSLDPGLFVESTRKGSVVSRANSIGSTSASSVPNTDDEDSDYHQEAYKESYKDRRRRAHTQAEQKRRDAIKRGYDDLQTIVPTCQQQDFSIGSQKLSKAIVLQKTIDYIQFLHKEKKKQEEEVSTLRKDVTALKIMKVNYEQIVKAHQDNPHEGEDQVSDQVKFNVFQGIMDSLFQSFNASISVASFQELSACVFSWIEEHCKPQTLREIVIGVLHQLKNQLY

SEQ ID NO: 2522 - protein, 218 aa, Homo sapiens
MLQEWLAAVGDDYAAVVWRPEGEPRFYPDEEGPKHWTKERHQFLMELKQEALTFARNWGADYILFADTDNILTNNQTLRLLMGQGLPVVAPMLDSQTYYSNFWCGITPQGYYRRTAEYFPTKNRQRRGCFRVPMVHSTFLASLRAEGADQLAFYPPHPNYTWPFDDIIVFAYACQAAGVSVHVCNEHRYGYMNVPVKSHQGLEDERVNFIHLILEALG

SEQ ID NO: 2523 - protein, 275 aa, Homo sapiens
IGSAREADPALNVETEIEILKKLNHPCIIKIKNFFDAEDYYIVLELMEGGELFDKVVGNKRLKEATCKLYFYQMLLAVQYLHENGIIHRDLKPENVLLSSQEEDCLIKITDFGHSKILGETSLMRTLCGTPTYLAPEVLVSVGTAGYNRAVDCWSLGVILFIWTQVSLKDQITSGKYNFIPEVWAEVSEKALDLVKKLLVVDPKARFTTEEALRHPWLQDEDMKRKFQDLLSEENESTALPQVLAQPSTSRKRPREGEAEGAETTKRPAVCAAVL

SEQ ID NO: 2524 - protein, 613 aa, Homo sapiens
MIQSDKGADPPDKKDMKLSTATNPQNGLSQILRLVLQELSLFYGRDVNGVCLLYDLLHSPWLQALLKIYDCLQEFKEKKLVPATPHAQVLSYEVVELLRETPTSPEIQELRQMLQAPHFKALLSAHDTIAQKDFEPLLPPLPDNIPESEEAMRIVCLVKNQQPLGATIKRHEMTGDILVARIIHGGLAERSGLLYAGDKLVEVNGVSVEGLDPEQVIHILAMSRGTIMFKVVPVSDPPVNSQQMVYVRAMTEYWPQEDPDIPCMDAGLPFQKGDILQIVDQNDALWWQARKISDPATCAGLVPSNHLLKRKQREFWWSQPYQPHTCLKSTLYEETFESDKEEFVGYGQKFFIAGFRRSMRLCRRKSHLSPLHASVCCTGSCYSAVGAPYEEVVRYQRRPSDKYRLIVLMGPSGVGVNELRRQLIEFNPSHFQSAVPHTTRTKKSYEMNGREYHYVSKETFENLIYSHRMLEYGEYKGHLYGTSVDAVQTVLVEGKICVMDLEPQDIQGVRTHELKPYVIFIKPSNMRCMKQSRKNAKVITDYYVDMKFKDEDLQEMENLAQRMETQFGQFFDHVIVNDSLHDACAQLLSAIQKAQEEPQWVPATWISSDTESQ

SEQ ID NO: 2525 - protein, 415 aa, Homo sapiens
MGRAPRAGRLPGIRRWPPRRKKKDLDVPEMPSIPNPFPELCCSPFTSVLSADLFPKANSRKKQVIKVYSEDETSRALDVPSDITARDVCQLLILKNHYIDDHSWTLFEHLPHIGVERTIEDHELVIEVLSNWGIEEENKLYFRKNYAKYEFFKNPMYFFPEHMVSFATETNGEISPTQILQMFLSSSTYPEIHGFLHAKEQGKKSWKKIYFFLRRSGLYFSTKGTSKEPRHLQFFSEFGNSDIYVSLAGKKKHGAPTNYGFCFKPNKAGGPRDLKMLCAEEEQSRTCWVTAIRLLKYGMQLYQNYMHPYQGRSGCSSQSISPMRSISENSLVAMDFSGQKSRVIENPTEALSVAVEEGLAWRKKGCLRLGTHGSPTASSQSSATNMAIHRSQPWFHHKISRDEAQRLIIQQGLVD

SEQ ID NO: 2526 - protein, 436 aa, Homo sapiens
LPFCGIAISNAQLFAASRKEYERSRALLEVVNDLFEEQTDLEKIVKKIMHRAQTLLKCERCSVLLLEDIESPVVKFTKSFELMSPKCSADAENSFKESMEKSSYSDWLINNSIAELVASTGLPVNISDAYQDPRFDAEADQISGFHIRSVLCVPIWNSNHQIIGVAQVLNRLDGKPFDDADQRLFEVLSYHATCSKAEVDKFKAANIPLVSELAIDDIHFDDFSLDVDAMITAALRMFMELGMVQKFKIDYETLCRWLLTVRKNYRMVLYHNWRHAFNVCQLMFAMLTTAGFQDILTEVEILAVIVGCLCHDLDHRGTNNAFQAKSGSALAQLYGTSATLEHHHFNHAVMILQSEGHNIFANLSSKEYSDLMQLLKQSILATDLTLYFERRTEFFELVSKGEYDWNIKNHRDIFRSMLMTACDLGAVTKPWEISRQ

SEQ ID NO: 2527 - protein, 188 aa, Homo sapiens
RAHQVTYSQSPKIATLMKSVSTSLEKKGHVYLVGWQTLGIIAIMDGVECIHTFGADFRDVRGFLIGDHSDMFNQKAELTNQGPQFTFSQEDFLTSILPSLTEIDTVVFIFTLDDNLTEVQTIVEQVKEKTNHIQALAHSTVGQTLLIPLKKLFPSIISITWPLLFFEYEGNFIQRSGFSTLPRLFANS

SEQ ID NO: 2528 - protein, 972 aa, Homo sapiens
MERMNWLSRLASRGPGHRIPQGANLQTPVMADPETCLMVFKNHWSQVVRILERQGPRAAPGGADDLSAVRNHTYQMLTLLAEDRAVPSAPTGPGPLLEFALHEDLLTRVLTWQLQWDELGDGVEERRAEQLKLFEMLVSEARQPLLRHGPVREALLTLLDACGRPVPSSPALDEGLVLLLSQLCVCVAQEPSLLEFFLQPPPEPGAAPRLLLFSRLVPFVHREGTLGQQARDALLLLMALSAGSPTVGRYIADHSYFCPVLATGLSALYSSLPRKIEVPGDDWHCLRREDWLGVPALALFMSSLEFCNAVIQVAHPLVQKQLVDYIHNGFLVPVMGPALHKTSVEEMIASTAYLELFLRSISEPALLRTFLRFLLLHRHDTHTILDTLVARIGSNSRLCMVSLSLFRTLLNLSCEDVLLQLVLRYLVPCNHVMLSQKPAVRDVDLYGRAADKFLSLIPRCCRHHAPSPPRPEHASWARGPGSPSVDSSSVTTVPRPSTPSRLALFLRQQSLGGSESPGPAPCSPGLSASPASSPGRRPTPAEEPGELEDNYLEYLREARRGVDRCVRACRTWSAPYDGERPSPEPSPFGSRTKKRSLLPEEDRNNVGEGEEEELGRRGRAGGAGEGPGHLPPPQLNGVPGSWPEGAKKVRLVPKEGAGELLEGISEGMAGLEGFGQELRELEVALSNGGTGSESPLEPPLPLEEEEAYESFTCPPEPPGPFLSSPLRTLNQLPSQPFTGPFMAVLFAKLENMLQNSVYVNFLLTGLVAQLACHPQPLLRSFLLNTNMVFQPSVKSLLQVLGSVKNKIENFAASQEDFPALLSKAKKYLIARGKLDWAEGPAAGPAPRRSDPLVKSRRPSLGELLLRHAHSPTRARQAAQLVLQPGRDGAGLGLSGGSPGASTPVLLTRGGAPERQGEALRVKNAVYCAVIFPEFLKELAAISQAHAVTSPFLLETSEEGSGPLISGCGPLNP

SEQ ID NO: 2529 - protein, 334 aa, Homo sapiens
MESAAALHFSRPASLLLLLLSLCALVSAQFIVVGPTDPILATVGENTTLRCHLSPEKNAEDMEVRWFRSQFSPAVFVYKGGRERTEEQMEEYRGRTTFVSKDISRGSVALVIHNITAQENGTYRCYFQEGRSYDEAILHLVVAGLGSKPLISMRGHEDGGIRLECISRGWYPKPLTVWRDPYGGVAPALKEVSMPDADGLFMVTTAVIIRDKSVRNMSCSINNTLLGQKKESVIFIPESFMPSVSPCAVALPIIVVILMIPIAVCIYWINKLQKEKKILSGEKEFERETREIALKELEKERVQKEEELQVKEKLQEELRWRRTFLHAELQFFSN

SEQ ID NO: 2530 - protein, 460 aa, Homo sapiens
MASLLQSDRVLYLVQGEKKVRAPLSQLYFCRYCSELRSLECVSHEVDSHYCPSCLENMPSAEAKLKKNRCANCFDCPGCMHTLSTRATSISTQLPDDPAKTTMKKAYYLACGFCRWTSRDVGMADKSVASGGWQEPENPHTQRMNKLIEYYQQLAQKEKVERDRKKLARRRNYMPLAFSDKYGLGTRLQRPRAGASISTLAGLSLKEGEDQKEIKIEPAQAVDEVEPLPEDYYTRPVNLTEVTTLQQRLLQPDFQPVCASQLYPRHKHLLIKRSLRCRKCEHNLSKPEFNPTSIKFKIQLVAVNYIPEVRIMSIPNLRYMKESQVLLTLTNPVENLTHVTLFECEEGDPDDINSTAKVVVPPKELVLAGKDAAAEYDELAEPQDFQDDPDIIAFRKANKVGIFIKVTPQREEGEVTVCFKMKHDFKNLAAPIRPIEESDQGTEVIWLTQHVELSLGPLLP

SEQ ID NO: 2531 - protein, 1185 aa, Homo sapiens
KKKVLTEADTPSKFDPINYLGEYLIRNNPNYIKDPGMSGYQRLMKEVTEDLKIYVPDTICNRVSKMKENVKQNRKQRESIDKIIVKVANTRKQALQEQFDEWILDPKGMIPKSVIQNVLQEFFQNPDFKLGSHCKQLDITDSTEPRLNKMEFTEYISSHIKDLKSEMFEELLKHLCHSADEFREVIKADMRRQMFAELFLHCDHGKVGFLDRQRTLALLELFYDHSSQMLRSLLRNPRQWPFIEFEEINLTELWGDMDNQKHIYEGFDKVLLEMNTLLSANHASKTQSKLLESPDQPKLNEQRTSTPSPNPPEQQRGVTAEQGPQRISIEEQQQGKKPTAEQELYIESVIEPGTHTESTLEQGSSRRLLTEQETHRESTTEQGQHKGSIEGQGPRRVSVSEQGSSRESVAEQGSRRESIAEQDRHKGSVAEQGSRRMSAAEQGSLRESVIEEPYQKSEQGPYGEIISEEQEDIGSTSQSRKDSILKSTKYGEPITSEYIEVPLQEKRSWEQTYEEEIFLSSELQEEVPTLSRKDHFPETTKKEVQKDKPCEPKSQKIEGKSWSGEFFTCNWKMKYVTFEDEEQANLIYGNSRFTAKLHIQFPKPHPGHEVRLSSKQFQNYIELVVSELRGNEDQVLESVVEFLMNALERSHIESLRNSARRKWLHQIQCAAETSGVSLEPVYSETFKALMQDAEAHGNKKISAHISLLEENLLLPEKGNVLLRNVACTLDDAQFVLNRVLYRDMKGISFTVVDEGKPIHVPQVQYHGNIFFWNQSRNKHDYNGSFLALPLQDAYMRIFGVLAVDTLRDPHEINIFLPHEIRFYQGVANVFSTAYHYVHSREHILHIVITGIGWLYDVTSSITSITTYFVEPSPAQDSDYVLRNMMVTGQLGLTEIHKNPPTIHRKSCIFRDFLFKCTDSSEVVLASACGETHIVVPLRERTGEALGVLDFNIGQNRMLLCQEYKDLQKMMKVVQVACYEILGEFSGEIKKKYILEIENVREVQRAGILFFRIMLLELQESIQLLNSMEFVSLLLYDHTLVTEPNSPQDSKSMELEANVKLVRDILKAVILFFHPELEFSSDFGSWDKCKFYVNKYLVNNICAFDPTAKHVEVNVQLIDEYIRDHSRTEVWKFGNVVIEHLYHWIHICSALMKITKQLNSGITPPLPSKTDNYMYAKMPGEGLQEK

SEQ ID NO: 2532 - protein, 100 aa, Homo sapiens
MFGLFVEHGPYVVTSNMTLRDRDFPWTTTLSMLYIDNPVGTGFSFTDDTHGYAVNEDDVARDLYSALIQFFQIFPEYKNNDFYVTGESYAGKYVPAIAHL

SEQ ID NO: 2533 - protein, 108 aa, Homo sapiens
MKKKLVVLGLLAVVLVLVIVGLCLWLPSASKEPDNHVYTRAAVAADAKQCSKIGRDALRDGGSAVDAAIAALLCVGLMNAHSMGIGGGLFLTIYNSTTRKAEVINARE

SEQ ID NO: 2534 - protein, 288 aa, Homo sapiens
MSRELAPLLLLLLSIHSALAMRICSFNVRSFGESKQEDKNAMDVIVKVIKRCDIILVMEIKDSNNRICPILMEKLNRNSRRGITYNYVISSRLGRNTYKEQYAFLYKEKLVSVKRSYHYHDYQDGDADVFSREPFVVWFQSPHTAVKDFVIIPLHTTPETSVKEIDELVEVYTDVKHRWKAENFIFMGDFNAGCSYVPKKAWKNIRLRTDPRFVWLIGDQEDTTVKKSTNCAYDRIVLRGQEIVSSVVPKSNSVFDFQKAYKLTEEEVRLPSCLSMPLSWKDELAWAT

SEQ ID NO: 2535 - protein, 216 aa, Homo sapiens
MSEVPVARVWLVLLLLTVQVGVTAGAPWQCAPCSAEKLALCPPVSASCSEVTRSAGCGCCPMCALPLGAACGVATARCARGLSCRALPGEQQPLHALTRGQGACVQESDASAPHAAEAGSPESPESTEITEEELLDNFHLMAPSEEDHSILWDAISTYDGSKALHVTNIKKWKCETSMDGEAGLCWCVYPWNGKRIPGSPEIRGDPNCQIYFNVQN

SEQ ID NO: 2536 - protein, 103 aa, Homo sapiens
MAAHLVKRCTCLLREAARQAPAMAPVGRLRLAWVAHKTLTSSATSPISHLPGSLMEPVEKERASTPYIEKQVDHLIKKATRPEELLELLGGSHDLDSNQAAMV

SEQ ID NO: 2537 - protein, 1008 aa, Homo sapiens
MSYDYHQNWGRDGGPRSSGGGYGGGPAGGHGGNRGSGGGGGGGGGGRGGRGRHPGHLKGREIGMWYAKKQGQKNKEAERQERAVVHMDERREEQIVQLLNSVQAKNDKESEAQISWFAPEDHGYGTEVSTKNTPCSENKLDIQEKKLINQEKKMFRIRNRSYIDRDSEYLLQENEPDGTLDQKLLEDLQKKKNDLRYIEMQHFREKLPSYGMQKELVNLIDNHQVTVISGETGCGKTTQVTQFILDNYIERGKGSACRIVCTQPRRISAISVAERVAAERAESCGSGNSTGYQIRLQSRLPRKQGSILYCTTGIILQWLQSDPYLSSVSHIVLDEIHERNLQSDVLMTVVKDLLNFRSDLKVILMSATLNAEKFSEYFGNCPMIHIPGFTFPVVEYLLEDVIEKIRYVPEQKEHRSQFKRGFMQGHVNRQEKEEKEAIYKERWPDYVRELRRRYSASTVDVIEMMEDDKVDLNLIVALIRYIVLEEEDGAILVFLPGWDNISTLHDLLMSQVMFKSDKFLIIPLHSLMPTVNQTQVFKRTPPGVRKIVIATNIAETSITIDDVVYVIDGGKIKETHFDTQNNISTMSAEWVSKANAKQRKGRAGRVQPGHCYHLYNGLRASLLDDYQLPEILRTPLEELCLQIKILRLGGIAYFLSRLMDPPSNEAVLLSIRHLMELNALDKQEELTPLGVHLARLPVEPHIGKMILFGALFCCLDPVLTIAASLSFKDPFVIPLGKEKIADARRKELAKDTRSDHLTVVNAFEGWEEARRRGFRYEKDYCWEYFLSSNTLQMLHNMKGQFAEHLLGAGFVSSRNPKDPESNINSDNEKIIKAVICAGLYPKVAKIRLNLGKKRKMVKVYTKTDGLVAVHPKSVNVEQTDFHYNWLIYHLKMRTSSIYLYDCTEVSPYCLLFFGGDISIQKDNDQETIAVDEWIVFQSPARIAHLVKELRKELDILLQEKIESPHPVDWNDTKSRDCAVLSAIIDLIKTQEKATPRNFPPRFQDGYYS

SEQ ID NO: 2538 - protein, 997 aa, Homo sapiens
MFTYICNHIKYATNRGNLRSAITVFPQRCPGRGDFRIWNSQLVRYAGYRQQDGSVRGDPANVEITELCIQHGWTPGNGRFDVLPLLLQAPDDPPELFLLPPELVLEVPLEHPTLEWFAALGLRWYALPAVSNMLLEIGGLEFPAAPFSGWYMSTEIGTRNLCDPHRYNILEDVAVCMDLDTRTTSSLWKDKAAVEINVAVLHSYQLAKVTIVDHHAATASFMKHLENEQKARGGCPADWAWIVPPISGSLTPVFHQEMVNYFLSPAFRYQPDPWKGSAAKGTGITRKKTFKEVANAVKISASLMGTVMAKRVKATILYGSETGRAQSYAQQLGRLFRKAFDPRVLCMDEYDVVSLEHETLVLVVTSTFGNGDPPENGESFAAALMEMSGPYNSSPRPEQHKSYKIRFNSISCSDPLVSSWRRKRKESSNTDSAGALGTLRFCVFGLGSRAYPHFCAFARAVDTRLEELGGERLLQLGQGDELCGQEEAFRGWAQAAFQAACETFCVGEDAKAAARDIFSPKRSWKRQRYRLSAQAEGLQLLPGLIHVHRRKMFQATIRSVENLQSSKSTRATILVRLDTGGQEGLQYQPGDHIGVCPPNRPGLVEALLSRVEDPPAPTEPVAVEQLEKGSPGGPPPGWVRDPRLPPCTLRQALTFFLDITSPPSPQLLRLLSTLAEEPREQQELEALSQDPRRYEEWKWFRCPTLLEVLEQFPSVALPAPLLLTQLPLLQPRYYSVSSAPSTHPGEIHLTVAVLAYRTQDGLGPLHYGVCSTWLSQLKPGDPVPCFIRGAPSFRLPPDPSLPCILVGPGTGIAPFRGFWQERLHDIESKGLQPTPMTLVFGCRCSQLDHLYRDEVQNAQQRGVFGRVLTAFSREPDNPKTYVQDILRTELAAEVHRVLCLERGHMFVCGDVTMATNVLQTVQRILATEGDMELDEAGDVIGVLRDQQRYHEDIFGLTLRTQEVTSRIRTQSFSLQERQLRGAVPWAFDPPGSDTNSP

SEQ ID NO: 2539 - protein, 438 aa, Homo sapiens
MENEPGIVSPFKRVFLKGEKSRDKKAHEKVTERRPLHTVVLSLPERVEPDRLLSDYIEKEVKYLGQLTSIPGYLNPSSRTEILHFIDNAKRAHQLPGHLTQEHDAVLSLSAYNVKLAWRDGEDIILRVPIHDIAAVSYVRDDAAHLVVLKTAQDPGISPSQSLCAESSRGLSAGSLSESAVGPVEACCLVILAAESKVAAEELCCLLGQVFQVVYTESTIDFLDRAIFDGASTPTHHLSLHSDDSSTKVDIKETYEVEASTFCFPESVDVGGASPHSKTISESELSASATELLQDYMLTLRTKLSSQEIQQFAALLHEYRNGASIHEFCINLRQLYGDSRKFLLLGLRPFIPEKDSQHFENFLETIGVKDGRGIITDSFGRHRRALSTTSSSTTNGNRATGSSDDRSAPSEGDEWDRMISDISSDIEALGCSMDQDSA

SEQ ID NO: 2540 - protein, 1393 aa, Homo sapiens
MAQPVHSLCSAFGLQCCLLFLLASWGAGATTFQEYQKTGELSTSDHIFPLTPGLVYSIPFDHIVLHSGQRPPELPKSTEIHEQKRHCNTTRHSKPTDKPTGNSKTIDHKSSTDNHEAPPTSEENSSNQGKDPMIRNQRSVDPADSTTTHKESAGKKHITPAPKSKINCRKSTTGKSTVTRKSDKTGRPLEKSMSTLDKTSTSSHKTTTSFHNSGNSQTKQKSTSFPEKITAASKTTYKTTGTPEESEKTEDSRTTVASDKLLTKTTKNIQETISANELTQSLAEPTEHGGRTANENNTPSPAEPTENRERTANENTTLSPAEPIENRERTANENTAPFPAGPTENREMTANENTTLFPAEPTEHGERTANENTTPSPAEPTEHGERTANENTTPSPAEPTEHGERTPFANDKTTSSSAESTEHGERTPLANENTTPSPAEPTENRERTANENTTPSPAGPTENRETTANEKTTLSPVEPTENRETTANEKTTPSPAEPTENGQRTPFANEKTTSSSAEPTEHGERTPLANENTTPSPAEPTENRERTANEKTTPSPAEPTENGDRTPLANEKTTPSLAEPTENGQRTPFANEKTTSSSAEPTEHEERTPLANENTTPSPAEPTENRERTANENTTPSPAGPTENREMTANEKTTLFPAEPTENRERTANEKTTSSPAEPTENGQRTPFANEKTTSSSAEPTEHGERTPLANENTTLSPAEPTENRERTANEKTTPFPAEPTENRERTANENTTPSPAQPTENGDRTPLANEKTTPSLAEPTENGKRTPFANEKTTSSSAEPTEHAERTPLANENTTSSPAEPTENRERTANEKTTQFPAEPTENRESTANEKTTPFPAEPTENREWTANENTTLSPAEPTEHEEMTPLANEKTTLSPAEPTENGERTPFTNEKTTPSSAEPTEHGERTPLANEITTPSRAEPTEHGERIANEKATPSPAKPTEHGETTVNEDTTPSSAEPTENGERTPLANENTTTSPTESTEHGERTANEKTTPSPAEPTEHGERTPSANEKTIPSPAKPTEHEEMTPSANENTTPSPVKPTEHGEKTTLANEKITLSPEGPTEHGAKTTSANEKITPSLAKPTEHGERTTSPNDKITSSAAESTEHRDRATSANVITPAPAEPIKHAKRTTLAHEKMTQVTEKSTEHPEKTTSTTEKTTRTPEKPTLYSEKTICTKGKNTPVPEKPTENLGNTTLTTETIKAPVKSTENPEKTAAVTKTIKPSVKVTGDKSLTTTSSHLNKTEVTHQVPTGSFTLITSRTKLSSITSEATGNESHPYLNKDGSQKGIHAGQMGENDSFPAWAIVIVVLVAVILLLVFLGLIFLVSYMMRTRRTLTQNTQYNDAEDEGGPNSYPVYLMEQQNLGMGQIPSPR

SEQ ID NO: 2541 - protein, 276 aa, Homo sapiens
TMGLSNILFVMAFLLSGAAPLKIQAYFNETADLPCQFANSQNQSLSELVVFWQDQENLVLNEVYLGKEKFDSVHSKYMGRTSFDSDSWTLRLHNLQIKDKGLYQCIIHHKKPTGMIRIHQMNSELSVLANFSQPEIVPISNITENVYINLTCSSIHGYPEPKKMSVLLRTKNSTIEYDGVMQKSQDNVTELYDVSISLSVSFPDVTSNMTIFCILETDKTRLLSSPFSIGTNTMEREESEQTKKREKIHIPERSDEAQRVFKSSKTSSCDKSDTCF

SEQ ID NO: 2542 - protein, 271 aa, Homo sapiens
MEEEGKKGKKPGIVSPFKRVFLKGEKSRDKKAHEKVTERRPLHTVVLSLPERVEPDRLLSDYIEKEVKYLGQLTSIPGYLNPSSRTEILHFIDNAKRAHQLPGHLTQEHDAVLSLSAYNVKLAWRDGEDIILRVPIHDIAAVSYVRDDAAHLVVLKTAQDPGISPSQSLCAESSRGLSAGSLSESAVGPVEACCLVILAAESKVAAEELCCLLGQVFQVVYTESTIDFLDRAIFDGASTPTHHLSLHSAASLNLWMWVVHHPTARPSVRAS

SEQ ID NO: 2543 - protein, 527 aa, Homo sapiens
RSQLQPEPAKTKALQTVIEMKDTKIASLERNIRDLEDEIQMLKANGVLNTEDREEEIKQIEVYKSHSKFMKTKIDQLKQELSKKESELLALQTKLETLSNQNSDCKQHIEVLKESLTAKEQRAAILQTEVDALRLRLEEKESFLNKKTKQLQDLTEEKGTLAGEIRDMKDMLEVKERKINVLQKKIENLQEQLRDKDKQLTNLKDRVKSLQTDSSNTDTALATLEEALSEKERIIERLKEQRERDDRERLEEIESFRKENKDLKEKVNALQAELTEKESSLIDLKEHASSLASAGLKRDSKLKSLEIAIEQKKEECSKLEAQLKKQAEQLFNQMYNPAHNIEDDSRMNPEFADQIKQLDKEASYYRDECGKAQAEVDRLLEILKEVENEKNDKDKKIAELERHMKDQNKKVANLKHNQQLEKKKNAQLLEEVRRREDSMADNSQHLQIEELMNALEKTRQELDATKARLASTQQSLAEKEAHLANLRIERRKQLEEILEMKQEALLAAISEKDANIALLELSASKKK

SEQ ID NO: 2544 - protein, 596 aa, Homo sapiens
MSNQQEKYEAQNIVNSTEESDDAFDTVTIPVPSEEPQESDQTEEHESGIEQFSESHAIHVEEQSDQSFSSLEPDNEQLMEEVISPRQVSYTPQHHEKQYAMQRPNDDSLAFLDKIKSVKESLQESVEDSLATVKVVLIPVGQEIVIPFKVDTILKYLKDHFSHLLGIPHSVLQIRYSGKILKNNETLVQHGVKPQEIVQVEIFSTNPDLYPVRRIDGLTDVSQIITVTVQTGLDQYQQVPVEIVKSDFHKPFLGGFRHKVTGVEYHNAGTQTVPKRIPERLSIFCRDTQTVFQKKNLQQTTNTTSTQMTNIGVYVSNMTDKLVTPGKYFSAAEYHAQRLKAVIVIQTYYRQWHAKIFVENLRRQKSLRLEWETQQELRKIREKEEWIKLDYHRRHNPKTNEDFEFLYNALEFWRQEELTRINQSFTGAERKAALCELLEKETQIIASIGRHRYIAYMANQEAAIQAFLDKCSAPKIWRTPNGKTIEMDTQFTIRARELQNIYKCIMLKNISQDERLDVLLTLKHTVKEHECKLTQEILELIDREVDLMMRGVKHHNLEGLRKRIATLFFHYIKTPLFNPEVAKYLKMGGEYLSMAL

SEQ ID NO: 2545 - protein, 128 aa, Homo sapiens
MAAHLVKRCTCLLREAARQAPAMAPVGRLRLAWVAHKTLTSSATSPISHLPGSLMEPVEKERASTPYIEKQVDHLIKKATRPEELLELLGGSHDLDSNQAAMVLIRLSHLLSEKPEDKGLLIQDAHFH

SEQ ID NO: 2546 - protein, 501 aa, Homo sapiens
MRAEEPCAPGAPSALGAQRTPGPELRLSSQLLPELCTFVVRVLFYLGPVYLAGYLGLSITWLLLGALLWMWWRRNRRGKLGRLAAAFEFLDNEREFISRELRGQHLPAWIHFPDVERVEWANKIISQTWPYLSMIMESKFREKLEPKIREKSIHLRTFTFTKLYFGQKCPRVNGVKAHTNTCNRRRVTVDLQICYIGDCEISVELQKIQAGVNGIQLQGTLRVILEPLLVDKPFVGAVTVFFLQKPHLQINWTGLTNLLDAPGINDVSDSLLEDLIATHLVLPNRVTVPVKKGLDLTNLRFPLPCGVIRVHLLEAEQLAQKDNFLGLRGKSDPYAKVSIGLQHFRSRTIYRNLNPTWNEVFEFMVYEVPGQDLEVDLYDEDTDRDDFLGSLQICLGDVMTNRVVDEWFVLNDTTSGRLHLRLEWLSLLTDQEVLTEDHGGLSTAILVVFLESACNLPRNPFDYLNGEYRAKKLSRFARVKQGQQRPFFLCQTICRQEDTYK

SEQ ID NO: 2547 - protein, 348 aa, Homo sapiens
MGPRARPALLLLMLLQTAVLQGRLLRSHSLHYLFMGASEQDLGLSLFEALGYVDDQLFVFYDHESRRVEPRTPWVSSRISSQMWLQLSQSLKGWDHMFTVDFWTIMENHNHSKESHTLQVILGCEMQEDNSTEGYWKYGYDGQDHLEFCPDTLDWRAAEPRAWPTKLEWERHKIRARQNRAYLERDCPAQLQQLLELGRGVLDQQVPPLVKVTHHVTSSVTTLRCRALNYYPQNITMKWLKDKQPMDAKEFEPKDVLPNGDGTYQGWITLAVPPGEEQRYTCQVEHPGLDQPLIVIWEPSPSGTLVIGVISGIAVFVVILFIGILFIILRKRQGSRGAMGHYVLAERE

SEQ ID NO: 2548 - protein, 463 aa, Homo sapiens
MGTRSAIAAPRILCSRGLRSGSARATGSGVERSPSAANPTLMTSLRTWPLPWALPSPTCLGPPIPPRRQRIFSFEINVSVAIITFASEPKVLMSVLNDNSRDMTEVISSLENANYKDHENGTGTNTYAALNSVYLMMNNQMRLLGMETMAWQEIRHAIILLTDGKSNMGGSPKTAVDHIREILNINQKRNDYLDIYAIGVGKLDVDWRELNELGSKKDGERHAFILQDTKALHQVFEHMLDVSKLTDTICGVGNMSANASDQERTPWHVTIKPKSQETCRGALISDQWVLTAAHCFRDGNDHSLWRVNVGDPKSQWGKEFLIEKAVISPGFDVFAKKNQGILEFYGDDIALLKLAQKVKMSTHARPICLPCTMEANLALRRPQGSTCRDHENELLNKQSVPAHFVALNGSKLNINLKMGVEWTSCAEVVSQEKTMFPNLTDVREVVTDQFLCSGTQEDESPCK

SEQ ID NO: 2549 - protein, 922 aa, Homo sapiens
MVQLRKLLRVLTLMKFPCCVLEVLLCALAAAARGQEMYAPHSIRIEGDVTLGGLFPVHAKGPSGVPCGDIKRENGIHRLEAMLYALDQINSDPNLLPNVTLGARILDTCSRDTYALEQSLTFVQALIQKDTSDVRCTNGEPPVFVKPEKVVGVIGASGSSVSIMVANILRLFQIPQISYASTAPELSDDRRYDFFSRVVPPDSFQAQAMVDIVKALGWNYVSTLASEGSYGEKGVESFTQISKEAGGLCIAQSVRIPQERKDRTIDFDRIIKQLLDTPNSRAVVIFANDEDIKQILAAAKRADQVGHFLWVGSDSWGSKINPLHQHEDIAEGAITIQPKRATVEGFDAYFTSRTLENNRRNVWFAEYWEENFNCKLTISGSKKEDTDRKCTGQERIGKDSNYEQEGKVQFVIDAVYAMAHALHHMNKDLCADYRGVCPEMEQAGGKKLLKYIRNVNFNGSAGTPVMFNKNGDAPGRYDIFQYQTTNTSNPGYRLIGQWTDELQLNIEDMQWGKGVREIPASVCTLPCKPGQRKKTQKGTPCCWTCEPCDGYQYQFDEMTCQHCPYDQRPNENRTGCQDIPIIKLEWHSPWAVIPVFLAMLGIIATIFVMATFIRYNDTPIVRASGRELSYVLLTGIFLCYIITFLMIAKPDVAVCSFRRVFLGLGMCISYAALLTKTNRIYRIFEQGKKSVTAPRLISPTSQLAITSSLISVQLLGVFIWFGVDPPNIIIDYDEHKTMNPEQARGVLKCDITDLQIICSLGYSILLMVTCTVYAIKTRGVPENFNEAKPIGFTMYTTCIVWLAFIPIFFGTAQSAEKLYIQTTTLTISMNLSASVALGMLYMPKVYIIIFHPELNVQKRKRSFKAVVTAATMSSRLSHKPSDRPNGEAKTELCENVDPNNCIPPVRKSVQKSVTWYTIPPTV

SEQ ID NO: 2550 - protein, 754 aa, Homo sapiens
LLVLGLLVAGAADGCELVPRHLRGRRATGSAATAASSPAAAAGDSPALMTDPCMSLSPPCFTEEDRFSLEALQTIHKQMDDDKDGGIEVEESDEFIREDMKYKDATNKHSHLHREDKHITIEDLWKRWKTSEVHNWTLEDTLQWLIEFVELPQYEKNFRDNNVKGTTLPRIAVHEPSFMISQLKISDRSHRQKLQLKALDVVLFGPLTRPPHNWMKDFILTVSIVIGVGGCWFAYTQNKTSKEHVAKMMKDLESLQTAEQSLMDLQERLEKAQEENRNVAVEKQNLERKMMDEINYAKEEACRLRELREGAECELSRRQYAEQELEQVRMALKKAEKEFELRSSWSVPDALQKWLQLTHEVEVQYYNIKRQNAEMQLAIAKDEVAASYLIQAEKIKKKRSTVFGTLHVAHSSSLDEVDHKILEAKKALSELTTCLRERLFRWQQIEKICGFQIAHNSGLPSLTSSLYSDHSWVVMPRVSIPPYPIAGGVDDLDEDTPPIVSQFPGTMAKPPGSLARSSSLCRSRRSIVPSSPQPQRAQLAPHAPHPSHPRHPHHPQHTPHSLPSPDPDILSVSSCPALYRNEEEEEAIYFSAEKQWEVPDTASECDSLNSSIGRKQSPPLSLEIYQTLSPRKISRDEVSLEDSSRGDSPVTVDVSWGSPDCVGLTETKSMIFSPASKVYNGILEKSCSMNQLSSGIPVPKPRHTSCSSAGNDSKPVQEAPSVARISSIPHDLCHNGEKSKKPSKIKSLFKKKSK

SEQ ID NO: 2551 - protein, 421 aa, Homo sapiens
MSNQQEKYEAQNIVNSTEESDDAFDTVTIPVPSEEPQESDQTEEHESGIEQFSESHAIHVEEQSDQSFSSLEPDNEQLMEEVISPRQVSYTPQHHEKQYAMQRPNDDSLAFLDKIKSVKESLQESVEDSLATVKVVLIPVGQEIVIPFKVDTILKYLKDHFSHLLGIPHSVLQIRYSGKILKNNETLVQHGVKPQEIVQVEIFSTNPDLYPVRRIDGLTDVSQIITVTVQTGLDQYQQVPVEIVKSDFHKPFLGGFRHKVTGVEYHNAGTQTVPKRIPERLSIFCRDTQTVFQKKNLQQTTNTTSTQMTNIGVYVSNMTDKLVTPGKYFSAAEYHAQRLKAVIVIQTYYRQWHAKIFVENLRRQKSLRLEWETQQELRKIREKEEWIKLDYHRRHNPKTNEDFEFLYNALELFSSKNMENP

SEQ ID NO: 2552 - protein, 399 aa, Homo sapiens
MDFSMVAGAAAYNEKSDLEIYKAFSSEMAKRSKMLSLNNYSVPQSTREEKRENGLEARSPAINLMGFNVEEMYEAHAWIQRILSLQNHHIIENNHILYLGRKEHDILSQLQKTSSVSITEIISPGRTELEIEGARADLIEVVMNIEDMLCKVQEEMARKKERGLWRSLGQWTIQQQKTQDEMKENIIFLKCPVPPTQELLDQKKQFEKCGLQVLKVEKIDNEVLMAAFQRKKKMMEEKLHRQPVSHRLFQQVPYQFCNVVCRVGFQRMYSTPCDPKYGAGIYFTKNLKNLAEKAKKISAADKLIYVFEAEVLTGFFCQGHPLNIVPPPLSPGAIDGHDSVVDNVSSPETFVIFSGMQAIPQYLWTCTQEYVQSQDYSSGPMRPFAQHPWRGFASGSPVD

SEQ ID NO: 2553 - protein, 248 aa, Homo sapiens
MEPVEKERASTPYIEKQVDHLIKKATRPEELLELLGGSHDLDSNQAAMVLIRLSHLLSEKPEDKGLLIQDAHFHQLLCLLNSQIASVWHGTLSKLLGSLYALGIPKASKELQSVEQEVRWRMRKLKYKHLAFLAESCATLSQEQHSQELLAELLTHLERRWTEIEDSHTLVTVMMKVGHLSEPLMNRLEDKCLELVEHFGPNELRKVLVMLAAQSRRSVPLLRAISYHLVQKPFSLTKDVLLDVAYAY

SEQ ID NO: 2554 - protein, 797 aa, Homo sapiens
MEQLDFETGPNIFDLQIYVKDEVGVTDLQVLTVQVTDVNEPPQFQGNLAEGLHLYIVERANPGFIYQVEAFDPEDTSRNIPLSYFLISPPKSFRMSANGTLFSTTELDFEAGHRSFHLIVEVRDSGGLKASTELQVNIVNLNDEVPRFTSPTRVYTVLEELSPGTIVANITAEDPDDEGFPSHLLYSITTVSKYFMINQLTGTIQVAQRIDRDAGELRQNPTISLEVLVKDRPYGGQENRIQITFIVEDVNDNPATCQKFTFSIMVPERTAKGTLLLDLNKFCFDDDSEAPNNRFNFTMPSGVGSGSRFLQDPAGSGKIVLIGDLDYENPSNLAAGNKYTVIIQVQDVAPPYYKNNVYVYILTSPENEFPLIFDRPSYVFDVSERRPARTRVGQVRATDKDLPQSSLLYSISTGGASLQYPNVFWINPKTGELQLVTKVDCETTPIYILRIQATNNEDTSSVTVTVNILEENDEKPICTPNSYFLALPVDLKVGTNIQNFKLTCTDLDSSPRSFRYSIGPGNVNNHFTFSPNAGSNVTRLLLTSRFDYAGGFDKIWDYKLLVYVTDDNLMSDRKKAEALVETGTVTLSIKVIPHPTTIITTTPRPRVTYQVLRKNVYSPSAWYVPFVITLGSILLLGLLVYLVVLLAKAIHRHCPCKTGKNKEPLTKKGETKTAERDVVVETIQMNTIFDGEAIDPVTGETYEFNSKTGARKWKDPLTQMPKWKESSHQGAAPRRVTAGEGMGSLRSANWEEDELSGKAWAEDAGLGSRNEGGKLGNPKNRNPAFMNRAYPKPHPGK

SEQ ID NO: 2555 - protein, 79 aa, Homo sapiens
MACLGFQRHKAQLNLATRTWPCTLLFFLLFIPVFCKAMHVAQPAVVLASSRGIASFVSKEKKPSYNRGLCENAPNRARM

SEQ ID NO: 2556 - protein, 159 aa, Homo sapiens
LMVDRIFSFEINVSVAIITFASEPKVLMSVLNDNSRDMTEVISSLENANYKDHENGTGTNTYAALNSVYLMMNNQMRLLGMETMAWQEIRHAIILLTDGKSNMGGSPKTAVDHIREILNINQKRNDYLAPKPQESGDFPLPHQTSMPSGWASWMWTGEN

SEQ ID NO: 2557 - protein, 935 aa, Homo sapiens
MKPPRPVRTCSKVLVLLSLLAIHQTTTAEKNGIDIYSLTVDSRVSSRFAHTVVTSRVVNRANTVQEATFQMELPKKAFITNFSMIIDGMTYPGIIKEKAEAQAQYSAAVAKGKSAGLVKATGRNMEQFQVSVSVAPNAKITFELVYEELLKRRLGVYELLLKVRPQQLVKHLQMDIHIFEPQGISFLETESTFMTNQLVDALTTWQNKTKAHIRFKPTLSQQQKSPEQQETVLDGNLIIRYDVDRAISGGSIQIENGYFVHYFAPEGLTTMPKNVVFVIDKSGSMSGRKIQQTREALIKILDDLSPRDQFNLIVFSTEATQWRPSLVPASAENVNKARSFAAGIQALGGTNINDAMLMAVQLLDSSNQEERLPEGSVSLIILLTDGDPTVGETNPRSIQNNVREAVSGRYSLFCLGFGFDVSYAFLEKLALDNGGLARRIHEDSDSALQLQDFYQEVANPLLTAVTFEYPSNAVEEVTQNNFRLLFKGSEMVVAGKLQDRGPDVLTATVSGKLPTQNITFQTESSVAEQEAEFQSPKYIFHNFMERLWAYLTIQQLLEQTVSASDADQQALRNQALNLSLAYSFVTPLTSMVVTKPDDQEQSQVAEKPMEGESRNRNVHSGSTFFKYYLQGAKIPKPGLDHTEASFSPRRGWNRQAGAAGSRMNFRPGVLSSRQLGLPGPPDVPDHAAYHPFRRLAILPASAPPATSNPDPAVSRVMNMKIEETTMTTQTPAPIQAPSAILPLPGQSVERLCVDPRHRQGPVNLLSDPEQGVEVTGQYEREKAGFSWIEVTFKNPLVWVHASPEHVVVTRNRRSSAYKWKETLFSVMPGLKMTMDKTGLLLLSDPDKVTIGLLFWDGRGEGLRLLLRDTDRFSSHVGGTLGQFYQEVLWGSPAASDDGRRTLRVQGNDHSATRERRLDYQEGPPGVEISCWSVEL

SEQ ID NO: 2558 - protein, 418 aa, Homo sapiens
MHGVCKEGDNCRYSHDLSDSPYSVVCKYFQRGYCIYGDRCRYEHSKPLKQEEATATELTTKSSLAASSSLSSIVGPLVEMNTGEAESRNSNFATVGAGSEDWVNAIEFVPGQPYCGRTAPSCTEAPLQGSVTKEESEKEQTAVETKKQLCPYAAVGECRYGENCVYLHGDSCDMCGLQVLHPMDAAQRSQHIKSCIEAHEKDMELSFAVQRSKDMVCGICMEVVYEKANPSERRFGILSNCNHTYCLKCIRKWRSAKQFESKIIKSCPECRITSNFVIPSEYWVEEKEEKQKLILKYKEAMSNKACRYFDEGRGSCPFGGNCFYKHAYPDGRREEPQRQKVGTSSRYRAQRRNHFWELIEERENSNPFDNDEEEVVTFELGEMLLMLLAAGGDDELTDSEDEWDLFHDELEDFYDLDL

SEQ ID NO: 2559 - protein, 482 aa, Homo sapiens
MAFMEKPPAGKVLLDDTVPLTAAIEASQSLQSHTIAGLSLPLPPKKLIGNMDREFIAERQKGLQNYLNVITTNHILSNCELVKKFLDPNNYSANYTEIALQQVSMFFRSEPKWEVVEPLKDIGWRIRKKYFLMKIKNQPKERLVLSWADLGPDKYLSDKDFQCLIKLLPSCLHPYIYRVTFATANESSALLIRMFNEKGTLKDLIYKAKPKDPFLKKYCNPKKIQGLELQQIKTYGRQILEVLKFLHDKGFPYGHLHASNVMLDGDTCRLLDLENSLLGLPSFYRSYFSQFRKINTLESVDVHCFGHLLYEMTYGRPPDSVPVDSFPPAPSMAVVAVLESTLSCEACKNGMPTISRLLQMPLFSDVLLTTSEKPQFKIPTKLKEALRIAKECIEKRLIEEQKQIHQHRRLTRAQSHHGSEEERKKRKILARKKSKRSALENSEEHSAKYSNSNNSAGSGASSPLTSPSSPTPPSTSVEHAPF

SEQ ID NO: 2560 - protein, 118 aa, Homo sapiens
MAAHLVKRCTCLLREAARQAPAMAPVGRLRLAWVAHKTLTSSATSPISHLPGSLMEPVEKERASTPYIEKQVDHLIKKATRPEELLELLGGSHDLDSNQAAMVLIRLSHLLSEKPEDK

SEQ ID NO: 2561 - protein, 137 aa, Homo sapiens
ADVFSREPFVVWFQSPHTAVKDFVIIPLHTTPETSVKEIDELVEVYTDVKHRWKAENFIFMGDFNAGCSYVPKKAWKNIRLRTDPRFVWLIGDQEDTTVKKSTNCAYDRPWMSATTFQLNLNYSLQGPSPTAKNLSL

SEQ ID NO: 2562 - protein, 782 aa, Homo sapiens
MLQQPGPRPGRQQPSGDRDACRLHPQGRPPALPTMIPAASSTPPGDALFPSVAPQDFWRSQVTGYSGSVTRHLSHRANNFKRHPKRRKCIRPSPPPPPNTPCPLELVDFGDLHPQRSFRELLFNGCILFGIEFSYAMETAYVTPVLLQMGLPDQLYSLVWFISPILGFLLQPLLGAWSDRCTSRFGRRRPFILVLAIGALLGLSLLLNGRDIGIALADVTGNHKWGLLLTVCGVVLMDFSADSADNPSHAYMMDVCSPADQDRGLNIHALLAGLGGGFGYVVGGIHWDKTGFGRALGGQLRVIYLFTAVTLSVTTVLTLVSIPERPLRPPSEKRAAMKSPSLPLPPSPPVLPEEGPGDSLPSHTATNFSSPISPPSPLTPKYGSFISRDSSLTGISEFASSFGTANIDSVLIDCFTGGHDSYLAIPGSVPRPPISVSFPRAPDGFYRQDRGLLEGREGALTSGCDGDILRVGSLDTSKPRSSGILKRPQTLAIPDAAGGGGPETSRRRNVTFSQQVANILLNGVKYESELTGSSERAEQPLSVGRLCSTICNMPKALRTLCVNHFLGWLSFEGMLLFYTDFMGEVVFQGDPKAPHTSEAYQKYNSGVTMGCWGMCIYAFSAAFYSAILEKLEEFLSVRTLYFIAYLAFGLGTGLATLSRNLYVVLSLCITYGILFSTLCTLPYSLLCDYYQSKKFAGSSADGTRRGMGVDISLLSCQYFLAQILVSLVLGPLTSAVGSANGVMYFSSLVSFLGCLYSSLFVIYEIPPSDAADEEHRPLLLNV

SEQ ID NO: 2563 - protein, 244 aa, Homo sapiens
MTVFFKTLRNHWKKTTAGLCLLTWGGHWLYGKHCDNLLRRAACQEAQVFGNQLIPPNAQVKKATVFLNPAACKGTLFEKNAAPILHLSGMDVTIVKTDYEGQAKKLLELMENTDVIIVAGGDGTLQEVVTGVLRRTDEATFSKIPIGFIPLGETSSLSHTLFAESGNKVQHITDATLAIVKGETVPLDVLQIKGEKEQPVFAMTGLRWGSFRDAGVKVSKYWYLGPLKIKAAHFFSTLKPFPKR

SEQ ID NO: 2564 - protein, 311 aa, Homo sapiens
FLKKYCNPKKIQGLELQQIKTYGRQILEVLKFLHDKGFPYGHLHASNVMLDGDTCRLLDLENSLLGLPSFYRSYFSQFRKINTLESVDVHCFGHLLYEMTYGRPPDSVPVDSFPPAPSMAVVAVLESTLSCEACKNGMPTISRLLQMPLFSDVLLTTSEKPQFKIPTKLKEALRIAKECIEKRLIEEQKQIHQHRRLTRAQSHHGSEEERKKRKILARKKSKRSALENSEEHSAKYSNSNNSGISALPPPPPPPPPPAAPLPPASTEAPAQLSSQAVNGMSRGALLSSIQNFQKGTLRKAKTCDHSAPKIG

SEQ ID NO: 2565 - protein, 440 aa, Homo sapiens
QAERKADNHTAHRIADQTALRVPSQAESSIFSQATNGVAEQNGHSTPGQAGRRASNPADVSDLRADDQVNQTPSEQTKGKASSQANNVQHEQSDGQVSGLTEERTAEQTERRLPTQAERRTSGQIDGRLAMPSDQRGSRQTDHRMAGQSERRASEQMDRRMSGEAERRTSEQITHRLSKLSERRPSVQIDSGSSVPSDQSPSVQIDSGSSVPSDQRPSVQIDRRMSGKVRRRSSEKTDYRLAGLADPGTSEQTDLRLYGLVDHKTSVKTHHQVYGQATELAEHQAIDQAHSNADQPPVDNAHYTESDQTDHLADRQANHKDQLSYYETRGQSEDRIFPQLGNSKEDKEADYRVQPCKFEDSQVDLNSKPSVEMETQNATTIPPYNPVDARFTSNFQAKDQALFPRLPSISSKLNYTSSQEKTQAIVTKSVQEMMKKRDKM

SEQ ID NO: 2566 - protein, 2570 aa, Homo sapiens
MRKHRHLPLVAVFCLFLSGFPTTHAQQQQAVIEVNKRDIVFLVDGSSALGLANFNAIRDFIAKVIQRLEIGQDLIQVAVAQYADTVRPEFYFNTHPTKREVITAVRKMKPLDGSALYTGSALDFVRNNLFTSSAGYRAAEGIPKLLVLITGGKSLDEISQPAQELKRSSIMAFAIGNKGADQAELEEIAFDSSLVFIPAEFRAAPLQGMLPGLLAPLRTLSGTPEESKRDILFLFDGSANLVGQFPVVRDFLYKIIDELNVKPEGTRIAVAQYSDDVKVESRFDEHQSKPEILNLVKRMKIKTGKALNLGYALDYAQRYIFVKSAGSRIEDGVLQFLVLLVAGRSSDRVDGPASNLKQSGVVPFIFQAKNADPAELEQIVLSPAFILAAESLPKIGDLHPQIVNLLKSVHNGAPAPVSGEKDVVFLLDGSEGVRSGFPLLKEFVQRVVESLDVGQDRVRVAVVQYSDRTRPEFYLNSYMNKQDVVNAVRQLTLLGGPTPNTGAALEFVLRNILVSSAGSRITEGVPQLLIVLTADRSGDDVRNPSVVVKRGGAVPIGIGIGNADITEMQTISFIPDFAVAIPTFRQLGTVQQVISERVTQLTREELSRLQPVLQPLPSPGVGGKRDVVFLIDGSQSAGPEFQYVRTLIERLVDYLDVGFDTTRVAVIQFSDDPKVEFLLNAHSSKDEVQNAVQRLRPKGGRQINVGNALEYVSRNIFKRPLGSRIEEGVPQFLVLISSGKSDDEVDDPAVELKQFGVAPFTIARNADQEELVKISLSPEYVFSVSTFRELPSLEQKLLTPITTLTSEQIQKLLASTRYPPPAVESDAADIVFLIDSSEGVRPDGFAHIRDFVSRIVRRLNIGPSKVRVGVVQFSNDVFPEFYLKTYRSQAPVLDAIRRLRLRGGSPLNTGKALEFVARNLFVKSAGSRIEDGVPQHLVLVLGGKSQDDVSRFAQVIRSSGIVSLGVGDRNIDRTELQTITNDPRLVFTVREFRELPNIEERIMNSFGPSAATPAPPGVDTPPPSRPEKKKADIVFLLDGSINFRRDSFQEVLRFVSEIVDTVYEDGDSIQVGLVQYNSDPTDEFFLKDFSTKRQIIDAINKVVYKGGRHANTKVGLEHLRVNHFVPEAGSRLDQRVPQIAFVITGGKSVEDAQDVSLALTQRGVKVFAVGVRNIDSEEVGKIASNSATAFRVGNVQELSELSEQVLETLHDAMHETLCPGVTDAAKACNLDVILGFDGSRDQNVFVAQKGFESKVDAILNRISQMHRVSCSGGRSPTVRVSVVANTPSGPVEAFDFDEYQPEMLEKFRNMRSQHPYVLTEDTLKVYLNKFRQSSPDSVKVVIHFTDGADGDLADLHRASENLRQEGVRALILVGLERVVNLERLMHLEFGRGFMYDRPLRLNLLDLDYELAEQLDNIAEKACCGVPCKCSGQRGDRGPIGSIGPKGIPGEDGYRGYPGDEGGPGERGPPGVNGTQGFQGCPGQRGVKGSRGFPGEKGEVGEIGLDGLDGEDGDKGLPGSSGEKGNPGRRGDKGPRGEKGERGDVGIRGDPGNPGQDSQERGPKGETGDLGPMGVPGRDGVPGGPGETGKNGGFGRRGPPGAKGNKGGPGQPGFEGEQGTRGAQGPAGPAGPPGLIGEQGISGPRGSGGAAGAPGERGRTGPLGRKGEPGEPGPKGGIGNRGPRGETGDDGRDGVGSEGRRGKKGERGFPGYPGPKGNPGEPGLNGTTGPKGIRGRRGNSGPPGIVGQKGDPGYPGPAGPKGNRGDSIDQCALIQSIKDKCPCCYGPLECPVFPTELAFALDTSEGVNQDTFGRMRDVVLSIVNDLTIAESNCPRGARVAVVTYNNEVTTEIRFADSKRKSVLLDKIKNLQVALTSKQQSLETAMSFVARNTFKRVRNGFLMRKVAVFFSNTPTRASPQLREAVLKLSDAGITPLFLTRQEDRQLINALQINNTAVGHALVLPAGRDLTDFLENVLTCHVCLDICNIDPSCGFGSWRPSFRDRRAAGSDVDIDMAFILDSAETTTLFQFNEMKKYIAYLVRQLDMSPDPKASQHFARVAVVQHAPSESVDNASMPPVKVEFSLTDYGSKEKLVDFLSRGMTQLQGTRALGSAIEYTIENVFESAPNPRDLKIVVLMLTGEVPEQQLEEAQRVILQAKCKGYFFVVLGIGRKVNIKEVYTFASEPNDVFFKLVDKSTELNEEPLMRFGRLLPSFVSSENAFYLSPDIRKQCDWFQGDQPTKNLVKFGHKQVNVPNNVTSSPTSNPVTTTKPVTTTKPVTTTTKPVTTTTKPVTIINQPSVKPAAAKPAPAKPVAAKPVATKMATVRPPVAVKPATAAKPVAAKPAAVRPPAAAAAKPVATKPEVPRPQAAKPAATKPATTKPMVKMSREVQVFEITENSAKLHWERAEPPGPYFYDLTVTSAHDQSLVLKQNLTVTDRVIGGLLAGQTYHVAVVCYLRSQVRATYHGSFSTKKSQPPPPQPARSASSSTINLMVSTEPLALTETDICKLPKDEGTCRDFILKWYYDPNTKSCARFWYGGCGGNENKFGSQKECEKVCAPVLAKPGVISVMGT

SEQ ID NO: 2567 - protein, 84 aa, Homo sapiens
LIEEQKQIHQHRRLTRAQSHHGSEEERKKRKILARKKSKRSALENSEEHSAKYSNSNNSGSGASSPLTSPSSPTPPSTSEHAPF

SEQ ID NO: 2568 - protein, 176 aa, Homo sapiens
DDELTYKTLFVPVNEGFVDNMTLSGPDLELHASNATLLSANASQGKLLPAHSGLSLIISDAGPDNSSWAPVQAVLAPEAPPVAAGVGAVLAAGALLGLVAGALYLRARGKPMGFGFSAFQAEDDADDDFSPWQEGTNPTLVSVPNPVFGSDTFCEPFDDSLLEEDFPDTQRILTVK

SEQ ID NO: 2569 - protein, 867 aa, Homo sapiens
MGPPSLVLCLLSATVFSLLGGSSAFLSHHRLKGRFQRDRRNIRPNIILVLTDDQDVELGSMQVMNKTRRIMEQGGAHFINAFVTTPMCCPSRSSILTGKYVHNHNTYTNNENCSSPSWQAQHESRTFAVYLNSTGYRTAFFGKYLNEYNGSYVPPGWKEWVGLLKNSRFYNYTLCRNGVKEKHGSDYSKDYLTDLITNDSVSFFRTSKKMYPHRPVLMVISHAAPHGPEDSAPQYSRLFPNASQHITPSYNYAPNPDKHWIMRYTGPMKPIHMEFTNMLQRKRLQTLMSVDDSMETIYNMLVETGELDNTYIVYTADHGYHIGQFGLVKGKSMPYEFDIRVPFYVRGPNVEAGCLNPHIVLNIDLAPTILDIAGLDIPADMDGKSILKLLDTERPVNRFHLKKKMRVWRDSFLVERGKLLHKRDNDKVDAQEENFLPKYQRVKDLCQRAEYQTACEQLGQKWQCVEDATGKLKLHKCKGPMRLGGSRALSNLVPKYYGQGSEACTCDSGDYKLSLAGRRKKLFKKKYKASYVRSRSIRSVAIEVDGRVYHVGLGDAAQPRNLTKRHWPGAPEDQDDKDGGDFSGTGGLPDYSAANPIKVTHRCYILENDTVQCDLDLYKSLQAWKDHKLHIDHEIETLQNKIKNLREVRGHLKKKRPEECDCHKISYHTQHKGRLKHRGSSLHPFRKGLQEKDKVWLLREQKRKKKLRKLLKRLQNNDTCSMPGLTCFTHDNQHWQTAPFWTLGPFCACTSANNNTYWCMRTINETHNFLFCEFATGFLEYFDLNTDPYQLMNAVNTLDRDVLNQLHVQLMELRSCKGYKQCNPRTRNMDLDGGSYEQYRQFQRRKWPEMKRPSSKSLGQLWEGWEG

SEQ ID NO: 2570 - protein, 459 aa, Homo sapiens
MAAPCEGQAFAVGVEKNWGAVVRSPEGTPQKIRQLIDEGIAPEEGGVDAKDTSATSQSVNGSPQAEQPSLESTSKEAFFSRVETFSSLKWAGKPFELSPLVCAKYGWVTVECDMLKCSSCQAFLCASLQPAFDFDRYKQRCAELKKALCTAHEKFCFWPDSPSPDRFGMLPLDEPAILVSEFLDRFQSLCHLDLQLPSLRPEDLKTMCLTEDKISLLLHLLEDELDHRTDERKTTIKLGSDIQVHVTACILSVCGWACSSPIPGLEGRPERLPLVPESPRRMMTRSQDATFSPGSEQAEKSPGPIVSRTRSWDSSSPVDRPEPEAASPTTRTRPVTRSMGTGDTPGLEVPSSPLRKAKRARLCSSSSSDTSSRSFFDPTSQHRDWCPWVNITLGKESRENGGTEPDASAPAEPGWKAVLTILLAHKQSSQPAETDSMSLSEKSRKVFRIFRQWESLCSC

SEQ ID NO: 2571 - protein, 667 aa, Homo sapiens
MGSPVHRVSLGDTWSRQMHPDIESERYMQSFDVERLTNILDGGAQNTALRRKVESIIHSYPEFSCKDNYFMTQNERYKAAMRRAFHIRLIARRLGWLEDGRELGYAYRALSGDVALNIHRVFVRALRSLGSEEQIAKWDPLCKNIQIIATYAQTELGHGTYLQGLETEATYDAATQEFVIHSPTLTATKWWPGDLGRSATHALVQAQLICSGARRGMHAFIVPIRSLQDHTPLPGIIIGDIGPKMDFDQTDNGFLQLNHVLPDGTYVKLGTAQSNYLPMVVVRVELLSGEILPILQKACVIAMRYSVIRRQSRLRPSDPEAKVLDYQTQQQKLFPQLAISYAFHFLAVSLLEFFQHSYTAILNQDFSFLPELHALSTGMKAMMSEFCTQGAEMCRRACGGHGYSKLSGLPSLVTKLSASCTYEGENTVLYLQVARFLVKSYLQTQMSPGSTPQRSLSPSVAYLTAPDLARCPAQRAADFLCPELYTTAWAHVAVRLIKDSVQHLQTLTQSGADQHEAWNQTTVIHLQAAKVHCYYVTVKGFTEALEKLENEPAIQQVLKRLCDLHAIHGILTNSGDFLHDAFLSGAQVDMARTAYLDLLRLIRKDAILLTDAFDFTDQCLNSALGCYDGNVYERLFQWAQKSPTNTQENPAYEEYIRPLLQSWRSKL

SEQ ID NO: 2572 - protein, 283 aa, Homo sapiens
MAAHLVKRCTCLLREAARQAPAMAPVGRLRLAWVAHKTLTSSATSPISHLPGSLMEPVEKERASTPYIEKQVDHLIKKATRPEELLELLGGSHDLDSNQAAMIASVWHGTLSKLLGSLYALGIPKASKELQSVEQEVRWRMRKLKYKHLAFLAESCATLSQEQHSQELLAELLTHLERRWTEIEDSHTLVTVMMKVGHLSEPLMNRLEDKCLELVEHFGPNELRKVLVMLAAQSRRSVPLLRAISYHLVQKPFSLTKDVLLDVAYAYGKLSFHQTQVSQRLAT

SEQ ID NO: 2573 - protein, 1001 aa, Homo sapiens
MAFYSCCWVLLALTWHTSAYGPDQRAQKKGDIILGGLFPIHFGVAAKDQDLKSRPESVECIRYNFRGFRWLQAMIFAIEEINSSPALLPNLTLGYRIFDTCNTVSKALEATLSFVAQNKIDSLNLDEFCNCSEHIPSTIAVVGATGSGVSTAVANLLGLFYIPQVSYASSSRLLSNKNQFKSFLRTIPNDEHQATAMADIIEYFRWNWVGTIAADDDYGRPGIEKFREEAEERDICIDFSELISQYSDEEEIQHVVEVIQNSTAKVIVVFSSGPDLEPLIKEIVRRNITGKIWLASEAWASSSLIAMPQYFHVVGGTIGFALKAGQIPGFREFLKKVHPRKSVHNGFAKEFWEETFNCHLQEGAKGPLPVDTFLRGHEESGDRFSNSSTAFRPLCTGDENISSVETPYIDYTHLRISYNVYLAVYSIAHALQDIYTCLPGRGLFTNGSCADIKKVEAWQVPFSNCSRDCLAGTRKGIIEGEPTCCFECVECPDGEYSDETDASACNKCPDDFWSNENHTSCIAKEIEFLSWTEPFGIALTLFAVLGIFLTAFVLGVFIKFRNTPIVKATNRELSYLLLFSLLCCFSSSLFFIGEPQDWTCRLRQPAFGISFVLCISCILVKTNRVLLVFEAKIPTSFHRKWWGLNLQFLLVFLCTFMQIVICVIWLYTAPPSSYRNQELEDEIIFITCHEGSLMALGFLIGYTCLLAAICFFFAFKSRKLPENFNEAKFITFSMLIFFIVWISFIPAYASTYGKFVSAVEVIAILAASFGLLACIFFNKIYIILFKPSRNTIEEVRCSTAAHAFKVAARATLRRSNVSRKRSSSLGGSTGSTPSSSISSKSNSEDPFPQPERQKQQQPLALTQQEQQQQPLTLPQQQRSQQQPRCKQKVIFGSGTVTFSLSFDEPQKNAMAHRNSTHQNSLEAQKSSDTLTRHEPLLPLQCGETDLDLTVQETGLQGPVGGDQRPEVEDPEELSPALVVSSSQSFVISGGGSTVTENVVNS

SEQ ID NO: 2574 - protein, 748 aa, Homo sapiens
QIEKWKLKQKKKLERKKLIKDMKAKIRVDTIAKRRAELILERDKKRRENVVRDDEEISEEELEEDNDDIENILEDEFPKDEEEMSGEEDEEQETDAIERLRGELGEKFEADTHNLQIIQDELERYLIPIISINGARRNHIVQYTLNMKLKPLVENRASIFEKCHPIPAPLAQKMLTFTYKYISSFGYWDPVKLSEGETIKPVENAENPIYPVIHRQYIYFLSSKETKEKFMKNPIKYIRQPKPKPTVPIRIIIVGPPKSGKTTVAKKITSEYGLKHLSIGGALRYVLNNHPETELALMLNWHLHKGMTAPDELAIQALELSLMESVCNTAGVVIDGYPVTKHQMNLLEARSIIPMVIFELSVPSKEIFKRLLLEKENEQRLPYPLHNSAQIVAVNNVKYRKNIGEIRQYYQEQHQNWYVIDGFHSKWWVWNEVIKNVQMVNKYMQTYLERIKAGKAACIDKLCITPQELLSRLGEFEQFCPVSLAESQELFDCSATDSLEFAAEFRGHYYKMSSQEKLNKFLENPELYVPPLAPHPLPSADMIPKRLTLSELKSRFPKCAELQGYCPVTYKDGNQRYEALVPGSINYALEYHNRIYICENKEKLQKFLRSPLKYWEQKLPHKLPPLREPILLTSLPLPGYLEQGIATSLIKAMNAAGCLKPKFPFLSIRRSALLYIALHLKAFNPKGSEYTRKKYKKKMEQFMESCELITYLGAKMTRKYKEPQFRAIDFDHKLKTFLSLRNIDPING

SEQ ID NO: 2575 - protein, 505 aa, Homo sapiens
MKRTPTAEEREREAKKLRLLEELEDTWLPYLTPKDDEFYQQWQLKYPKLILREASSVSEELHKEVQEAFLTLHKHGCLFRDLVRIQGKDLLTPVSRILIGNPGCTYKYLNTRLFTVPWPVKGSNIKHTEAEIAAACETFLKLNDYLQIETIQALEELAAKEKANEDAVPLCMSADFPRVGMGSSYNGQDEVDIKSRAAYNVTLLNFMDPQKMPYLKEEPYFGMGKMAVSWHHDENLVDRSAVAVYSYSCEGPEEESEDDSHLEGRDPDIWHVGFKISWDIETPGLAIPLHQGDCYFMLDDLNATHQHCVLAGSQPRFSSTHRVAECSTGTLDYILQRCQLALQNVCDDVDNDDVSLKSFEPAVLKQGEEIHNEVEFEWLRQFWFQGNRYRKCTDWWCQPMAQLEALWKKMEGVTNAVLHEVKREGLPVEQRNEILTAILASLTARQNLRREWHARCQSRIARTLPADQKPECRPYWEKDDASMPLPFDLTDIVSELRGQLLEAKP

SEQ ID NO: 2576 - protein, 50 aa, Homo sapiens
KKSKRSALENSEEHSAKYSNSNNSGSGASSPLTSPSSPTPPSTSVEHAPF

SEQ ID NO: 2577 - protein, 468 aa, Homo sapiens
MTSRILLRQQLMREQMQEQERREQQQKLQAAQFMQQRVPVSQTPAINVSVPTTLPSATQVPMEVLKVQTHLENPTKYHIQQAQRQQVKQYLSTTLANKHANQVLSLPCPNQPGDHVMPPVPGSSAPNSPMAMLTLNSNCEKEGFYKFEEQNRAESECPGMNTHSRASCMQMDDVIDDIISLESSYNEEILGLMDPALQMANTLPVSGNLIDLYGNQGLPPPGLTISNSCPANLPNIKRELTESEARALAKERQKKDNHNLIERRRRFNINDRIKELGTLIPKSNDPDMRWNKGTILKASVDYIRKLQREQQRAKELENRQKKLEHANRHLLLRIQELEMQARAHGLSLIPSTGLCSPDLVNRIIKQEPVLENCSQDLLQHHADLTCTTTLDLTDGTITFNNNLGTGTEANQAYSVPTKMGSKLEDILMDDTLSPVGVTDPLLSSVSPGASKTSSRRSSMSMEETEHTC

SEQ ID NO: 2578 - protein, 193 aa, Homo sapiens
MHGVCKEGDNCRYSHDLSDSPYSVVCKYFQRGYCIYGDRCRYEHSKPLKQEEATATELTTKSSLAASSSLSSIVGPLVEMNTGEAESRNSNFATVGAGSEDWVNAIEFVPGQPYCGRTAPSCTEAPLQGSVTKEESEKEQTAVETKKQLCPYAAVGECRYGENCVYLHGDSCDMCGLQVLHPMDAAQRSQHIK

SEQ ID NO: 2579 - protein, 710 aa, Homo sapiens
MDFSMVAGAAAYNEKSETGALGENYSWQIPINHNDFKILKNNERQLCEVLQNKFGCISTLVSPVQEGNSKSLQVFRKMLTPRIELSVWKDDLTTHAVDAVVNAANEDLLHGGGLALALVKAGGFEIQEESKQFVARYGKVSAGEIAVTGAGRLPCKQIIHAVGPRWMEWDKQGCTGKLQRAIVSILNYVIYKNTHIKTVAIPALSSGIFQFPLNLCTKTIVETIRVSLQGKPMMSNLKEIHLVSNEDPTVAAFKAASEFILGKSELGQETTPSFNAMVVNNLTLQIVQGHIEWQTADVIVNSVNPHDITVGPVAKSILQQAGVEMKSEFLATKAKQFQRSQLVLVTKGFNLFCKYIYHVLWHSEFPKPQILKHAMKECLEKCIEQNITSISFPALGTGNMEIKKETAAEILFDEVLTFAKDHVKHQLTVKFVIFPTDLEIYKAFSSEMAKRSKMLSLNNYSVPQSTREEKRENGLEARSPAINLMGFNVEEMYEAHAWIQRILSLQNHHIIENNHILYLGRKEHDILSQLQKTSSVSITEIISPGRTELEIEGARADLIEVVMNIEDMLCKVQEEMARKKERGLWRSLGQWTIQQQKTQDEMKENIIFLKCPVPPTQELLDQKKQFEKCGLQVLKVEKIDNEVLMAAFQRKKKMMEEKLHRQPVSHRLFQQVPYQFCNVVCRVGFQRMYSTPCGRCQCLIIGATLWNLVS

SEQ ID NO: 2580 - protein, 167 aa, Homo sapiens
MEPAAGSSMEPSADWLATAAARGRVEEVRALLEAGALPNAPNSYGRRPIQVMMMGSARVAELLLLHGAEPNCADPATLTRPVHDAAREGFLDTLVVLHRAGARLDVRDAWGRLPVDLAEELGHRDVARYLRAAAGGTRGSNHARIDAAEGPSEMIGNHLWVCRSRHA

SEQ ID NO: 2581 - protein, 506 aa, Homo sapiens
MGTRSAIAAPRILCSRGLRSGSARATGSGVERSPSAAIFSFEINVSVAIITFASEPKVLMSVLNDNSRDMTEVISSLENANYKDHENGTGTNTYAALNSVYLMMNNQMRLLGMETMAWQEIRHAIILLTDGKSNMGGSPKTAVDHIREILNINQKRNDYLDIYAIGVGKLDVDWRELNELGSKKDGERHAFILQDTKALHQVFEHMLDVSKLTDTICGVGNMSANASDQERTPWHVTIKPKSQETCRGALISDQWVLTAAHCFRDGNDHSLWRVNVGDPKSQWGKEFLIEKAVISPGFDVFAKKNQGILEFYGDDIALLKLAQKVKMSTHARPICLPCTMEANLALRRPQGSTCRDHENELLNKQSVPAHFVALNGSKLNINLKMGVEWTSCAEVVSQEKTMFPNLTDVREVVTDQFLCSGTQEDESPCKGESGGAVFLERRFRFFQVGLVSWGLYNPCLGSADKNSRKRAPRSKVPPPRDFHINLFRMQPWLRQHLGDVLNFLPL

SEQ ID NO: 2582 - protein, 247 aa, Homo sapiens
MGRTSFDSDSWTLRLHNLQIKDKGLYQCIIHHKKPTGMIRIHQMNSELSVLANFSQPEIVPISNITENVYINLTCSSIHGYPEPKKMSVLLRTKNSTIEYDGVMQKSQDNVTELYDVSISLSVSFPDVTSNMTIFCILETDKTRLLSSPFSIELEDPQPPPDHIPWITAVLPTVIICVMVFCLILWKWKKKKRPRNSYKCGTNTMEREESEQTKKREKIHIPERSDEAQRVFKSSKTSSCDKSDTCF

SEQ ID NO: 2583 - protein, 819 aa, Homo sapiens
MDFSMVAGAAAYNEKSETGALGENYSWQIPINHNDFKILKNNERQLCEVLQNKFGCISTLVSPVQEGNSKSLQVFRKMLTPRIELSVWKDDLTTHAVDAVVNAANEDLLHGGGLALALVKAGGFEIQEESKQFVARYGKVSAGEIAVTGAGRLPCKQIIHAVGPRWMEWDKQGCTGKLQRAIVSILNYVIYKNTHIKTVAIPALSSGIFQFPLNLCTKTIVETIRVSLQGKPMMSNLKEIHLVSNEDPTVAAFKAASEFILGKSELGQETTPSFNAMVVNNLTLQIVQGHIEWQTADVIVNSVNPHDITVGPVAKSILQQAGVEMKSEFLATKAKQFQRSQLVLVTKGFNLFCKYIYHVLWHSEFPKPQILKHAMKECLEKCIEQNITSISFPALGTGNMEIKKETAAEILFDEVLTFAKDHVKHQLTVKFVIFPTDLEIYKAFSSEMAKRSKMLSLNNYSVPQSTREEKRENGLEARSPAINLMGFNVEEMYEAHAWIQRILSLQNHHIIENNHILYLGRKEHDILSQLQKTSSVSITEIISPGRTELEIEGARADLIEVVMNIEDMLCKVQEEMARKKERGLWRSLGQWTIQQQKTQDEMKENIIFLKCPVPPTQELLDQKKQFEKCGLQVLKVEKIDNEVLMAAFQRKKKMMEEKLHRQPVSHRLFQQVPYQFCNVVCRVGFQRMYSTPCDPKYGAGIYFTKNLKNLAEKAKKISAADKLIYVFEAEVLTGFFCQGHPLNIVPPPLSPGAIDGHDSVVDNVSSPETFVIFSGMQAIPQYLWTCTQEYVQSQDYSSGPMRPFAQHPWRGFASGSPVD

SEQ ID NO: 2584 - protein, 330 aa, Homo sapiens
MESAAALHFSRPASLLLLLLSLCALVSAQFIVVGPTDPILATVGENTTLRCHLSPEKNAEDMEVRWFRSQFSPAVFVYKGGRERTEEQMEEYRGRTTFVSKDISRGSVALVIHNITAQENGTYRCYFQEGRSYDEAILHLVVAGLGSKPLISMRGHEDGGIRLECISRGWYPKPLTVWRDPYGGVAPALKEVSMPDADGLFMVTTAVIIRDKSVRNMSCSINNTLLGQKKESVIFIPESFMPSVSPCAVALPIIVVILMIPIAVCIYWINKLQKEKKILSGEKEFERETREIALKELEKERVQKEEELQVKEKLQEELRWRRTFLHAGPV

SEQ ID NO: 2585 - protein, 563 aa, Homo sapiens
MAFMEKPPAGKVLLDDTVPLTAAIEASQSLQSHTIVRRYSDFDLLNNSLQIAGLSLPLPPKKLIGNMDREFIAERQKGLQNYLNVITTNHILSNCELVKKFLDPNNYSANYTEIALQQVSMFFRSEPKWEVVEPLKDIGWRIRKKYFLMKIKNQPKERLVLSWADLGPDKYLSDKDFQCLIKLLPSCLHPYIYRVTFATANESSALLIRMFNEKGTLKDLIYKAKPKDPFLKKYCNPKKIQGLELQQIKTYGRQILEVLKFLHDKGFPYGHLHASNVMLDGDTCRLLDLENSLLGLPSFYRSYFSQFRKINTLESVDVHCFGHLLYEMTYGRPPDSVPVDSFPPAPSMAVVAVLESTLSCEACKNGMPTISRLLQMPLFSDVLLTTSEKPQFKIPTKLKEALRIAKECIEKRLIEEQKQIHQHRRLTRAQSHHGSEEERKKRKILARKKSKRSALENSEEHSAKYSNSNNSGSGASSPLTSPSSPTPPSTSAALGLSKRCKERDICITSTSSTSTTTSSSLASCEHRGTCPALVSGCEWHEPRGLAQLHPEFPKRNFEESQNL

SEQ ID NO: 2586 - protein, 275 aa, Homo sapiens
MSRELAPLLLLLLSIHSALAMRICSFNVRSFGESKQEDKNAMDVIVKVIKRCDIILVMEIKDSNNRICPILMEKLNREKLVSVKRSYHYHDYQDGDADVFSREPFVVWFQSPHTAVKDFVIIPLHTTPETSVKEIDELVEVYTDVKHRWKAENFIFMGDFNAGCSYVPKKAWKNIRLRTDPRFVWLIGDQEDTTVKKSTNCAYDRIVLRGQEIVSSVVPKSNSVFDFQKAYKLTEEEALDVSDHFPVEFKLQSSRAFTNSKKSVTLRKKTKSKRS

SEQ ID NO: 2587 - protein, 268 aa, Homo sapiens
DDRTPDVIALTVAFFLFEFLAATQDIAVDGWALTMLSRENIGFSAADAVTGLKLVEEGVPKEHLALLAVPMVPLQIILPLIISKYTAGPQPLNTFYKAMPYRLLLGLEYALLVWWTPKVEHQGGFPIYYYIVVLLSYALHQVTVYSMYVSIMAFNAKVSDPLIGGTYMTLLNTVSNLGGNWPSTVALWLVDPLTVKECVGASNQNCRTPDAVELCKKLGGSCVTALDGYYVESIICVFIGFGWWFFLGPKFKKLQDEGSSSWKCKRNN

SEQ ID NO: 2588 - protein, 746 aa, Homo sapiens
LLVLGLLVAGAADGCELVPRHLRGRRATGSAATAASSPAAAAGDSPALMTDPCMSLSPPCFTEEDRFSLEALQTIHKQMDDDKDGGIEVEESDEFIREDMKYKDATNKHSHLHREDKHITIEDLWKRWKTSEVHNWTLEDTLQWLIEFVELPQYEKNFRDNNVKGTTLPRIAVHEPSFMISQLKISDRSHRQKLQLKALDVVLFGPLTRPPHNWMKDFILTVSIVIGVGGCWFAYTQNKTSKEHVAKMMKDLESLQTAEQSLMDLQERLEKAQEENRNVAVEKQNLERKMMDEINYAKEEACRLRELREGAECELSRRQYAEQELEQVRMALKKAEKEFELRSSWSVPDALQKWLQLTHEVEVQYYNIKRQNAEMQLAIAKDEAEKIKKKRSTVFGTLHVAHSSSLDEVDHKILEAKKALSELTTCLRERLFRWQQIEKICGFQIAHNSGLPSLTSSLYSDHSWVVMPRVSIPPYPIAGGVDDLDEDTPPIVSQFPGTMAKPPGSLARSSSLCRSRRSIVPSSPQPQRAQLAPHAPHPSHPRHPHHPQHTPHSLPSPDPDILSVSSCPALYRNEEEEEAIYFSAEKQWEVPDTASECDSLNSSIGRKQSPPLSLEIYQTLSPRKISRDEVSLEDSSRGDSPVTVDVSWGSPDCVGLTETKSMIFSPASKVYNGILEKSCSMNQLSSGIPVPKPRHTSCSSAGNDSKPVQEAPSVARISSIPHDLCHNGEKSKKPSKIKSLFKKKSK

SEQ ID NO: 2589 - protein, 828 aa, Homo sapiens
MAEAEFKDHSTAMDTEPNPGTSSVSTTTSSTTTTTITTSSSRMQQPQISVYSGSDRHAVQVIQQALHRPPSSAAQYLQQMYAAQQQHLMLHTAALQQQHLSSSQLQSLAAVQASLSSGRPSTSPTGSVTQQSSMSQTSLIFTPATTVAAVQSDIPVVSSSSSSSCQSAATQVQNLTLRSQKLGVLSSSQNGPPKSTSQTQSLTICHNKTTVTSSKISQRDPSPESNKKGESPSLESRSTAVTRTSSIHQLIAPASYSPIQPHSLIKHQQIPLHSPPSKVSHHQLILQQQQQQIQPITLQNSTQDPPPSQHCIPLQNHGLPPAPSNAQSQHCSPIQSHPSPLTVSPNQSQSAQQSVVVSPPPPHSPSQSPTIIIHPQALIQPHPLVSSALQPGPNLQQSTANQVQATAQLNLPSHLPLPASPVVHIGPVQQSALVSPGQQIVSPSHQQYSSLQSSPIPIASPPQMSTSPPAQIPPLPLQSMQSLQVQPEILSQGQVLVQNALVSEEELPAAEALVQLPFQTLPPPQTVAVNLQVQPPAPVDPPVVYQVEDVCEEEMPEESDECVRMDRTPPPPTLSPAAITVGRGEDLTSEHPLLEQVELPAVASVSASVIKSPSDPSHVSVPPPPLLLPAATTRSNSTSMHSSIPSIENKPPQAIVKPQILTHVIEGFVIQEGLEPFPVSRSSLLIEQPVKKRPLLDNQVINSVCVQPELQNNTKHADNSSDTEMEDMIAEETLEEMDSELLKCEFCGKMGYANEFLRSKRFCTMSCAKRYNVSCSKKFALSRWNRKPDNQSLGHRGRRPSGPDGAAREHILRQKKTWLLMKILCHLL

SEQ ID NO: 2590 - protein, 340 aa, Homo sapiens
MESLGLHTVTLSDGTTAYVQQAVKGEKLLEGQVIQLEDGTTAYIHQVTVQKEALSFEDGQPVQLEDGSMAYIHRTPREGYDPSTLEAVQLEDGSTAYIHHPVAVPSESTILAVQTEVGLEDLAAEDDEGFSADAVVALEQYASKVLHDSQIPRNGKGQQVGDRAFRCGYKGCGRLYTTAHHLKVHERAHTGDRPYRCDFPSCGKAFATGYGLKSHVRTHTGEKPYKCPEELCSKAFKTSGDLQKHVRTHTGERPFQCPFEGCGRSFTTSNIRKVHVRTHTGERPYTCPEPHCGRGFTSATNYKNHVRIHTGEKPYVCTVPGCGKRFTEYSSLYKHHVVHT

SEQ ID NO: 2591 - protein, 175 aa, Homo sapiens
MGAAQGKKKTYSPQARFHSENEKQRRNGSAAMYSEIQRERADIGGLMARPEYREWNPELIKPKKLLNPVKASRSHQELHRELLMNHRRGLGVDSKPELQRVLEHRRRNQLIKKKKEELEAKRLQCPFEQELLRRQQRLNQLEKPPEKEEDHAPEFIKVRENLRRIATLTSEEREL

SEQ ID NO: 2592 - protein, 185 aa, Homo sapiens
WGTVFLITTTLVALLKKENEVSVVKEETQGITDTYKLLFAIIKMPAVLTFCLLILTAKVTVYSMYVSIMAFNAKVSDPLIGGTYMTLLNTVSNLGGNWPSTVALWLVDPLTVKECVGASNQNCRTPDAVELCKKLGGSCVTALDGYYVESIICVFIGFGWWFFLGPKFKKLQDEGSSSWKCKRNN

SEQ ID NO: 2593 - protein, 359 aa, Homo sapiens
MAGHLASDFAFSPPPGGGGDGPWGAEPGWVDPLTWLSFQGPPGGPGIGPGVGPGSEVWGIPPCPPPYELCGGMAYCGPQVGVGLVPQGGLETSQPESEAGVGVESNSNGASPEPCTVPPGAVKLEKEKLEQNPEKSQDIKALQKELEQFAKLLKQKRITLGYTQADVGLILGVLFGKVFSQKTICRFEALQLSFKNMCKLRPLLQKWVEEADNNENLQEICKAETLMQARKRKRTSIENRVRGNLENLFLQCPKPTLQISHIAQQLGLEKDVVRVWFCNRRQKGKRSSSDYAQREDFEAAGSPFSGGPVSFPPAPGPHFGTPGYGSPHFTALYSSVPFPEGEVFPPVSVITLGSPMHSN

SEQ ID NO: 2594 - protein, 220 aa, Homo sapiens
MAVFLQLLPLLLSRAQGNPGASLDGRPGDRVNLSCGGVSHPIRWVWAPSFPACKGLSKGRRPILWASSSGTPTVPPLQPFVGRLRSLDSGIRRLELLLSAGDSGTFFCKGRHEDESRTVLHVLGDRTYCKAPGPTHGSVYPQLLIPLLGAGLVLGLGALGLVWWLHRRLPPQPIRPLPRFAPLVKTEPQRPVKEEEPKIPGDLDQEPVRAWGWEGDSQNL

SEQ ID NO: 2595 - protein, 599 aa, Homo sapiens
LLVLGLLVAGAADGCELVPRHLRGRRATGSAATAASSPAAAAGDSPALMTDPCMSLSPPCFTEEDRFSLEALQTIHKQMDDDKDGGIEVEESDEFIREDMKYKDATNKHSHLHREDKHITIEDLWKRWKTSEVHNWTLEDTLQWLIEFVELPQYEKNFRDNNVKGTTLPRIAVHEPSFMISQLKISDRSHRQKLQLKALDVVLFGPLTRPPHNWMKDFILTVSIVIGVGGCWFAYTQNKTSKEHVAKMMKDLESLQTAEQSLMDLQERLEKAQEENRNVAVEKQNLERKMMDEINYAKEEACRLRELREGAECELSRRQYAEQELEQVRMALKKAEKEFELRSSWSVPDALQKWLQLTHEVEVQYYNIKRQNAEMQLAIAKDEAEKIKKKRSTVFGTLHVAHSSSLDEVDHKILEAKKALSELTTCLRERLFRWQQIEKICGFQIAHNSGLPSLTSSLYSDHSWVVMPRVSIPPYPIAGGVDDLDEDTPPIVSQFPGTMAKPPGSLARSSSLCRSRRSIVPSSPQPQRAQLAPHAPHPSHPRHPHHPQHTPHSLPSPDPDILSVSSCPALYRNEEEEEAIYFSAEKQCIHLGLGACKSE

SEQ ID NO: 2596 - protein, 269 aa, Homo sapiens
MIEDVQSLLDEEQEQMFAFRSRARSTDTFNYATYHTLEEIYDFLDLLVAENPHLVSKIQIGNTYEGRPIYVLKFSTGGSKRPAIWIDTGIHSREWVTQASGVWFAKKITQDYGQDAAFTAILDTLDIFLEIVTNPDGFAFTHSTNRMWRKTRSHTAGSLCIGVDPNRNWDAGFGLSGASSNPCSETYHGKFANSEVEVKSIVDFVKDHGNIKAFISIHSYSQLLMYPYGYKTEPVPDQDELDQLSKAAVTALASLYGTKFNYGSIIKAI

SEQ ID NO: 2597 - protein, 347 aa, Homo sapiens
MENEPGIVSPFKRVFLKGEKSRDKKAHEKVTERRPLHTVVLSLPERVEPDRLLSDYIEKEVKYLGQLTSIPGYLNPSSRTEILHFIDNAKRAHQLPGHLTQEHDAVLSLSAYNVKLAWRDGEDIILRVPIHDIAAVSYVRDDAAHLVVLKTDDSSTKVDIKETYEVEASTFCFPESVDVGGASPHSKTISESELSASATELLQDYMLTLRTKLSSQEIQQFAALLHEYRNGASIHEFCINLRQLYGDSRKFLLLGLRPFIPEKDSQHFENFLETIGVKDGRGIITDSFGRHRRALSTTSSSTTNGNRATGSSDDRSAPSEGDEWDRMISDISSDIEALGCSMDQDSA

SEQ ID NO: 2598 - protein, 166 aa, Homo sapiens
MAVWLAQWLGPLLLVSLWGLLAPASLLRRLGEHIQQFQESSAQGLGLSLGPGAAALPKVGWLEQLLDPFNVSDRRSFLQRYWVNDQHWVGQDGPIFLHLGGEGSLGPGSVMRGHPAALAPAWGALVISLEHRFYGLSIPAGGLEMAQLRFLSSRLALSCTAWARSV

SEQ ID NO: 2599 - protein, 331 aa, Homo sapiens
MIEDVQSLLDEEQEQMFAFRSRARSTDTFNYATYHTLEEIYDFLDLLVAENPHLVSKIQIGNTYEGRPIYVLKFSTGGSKRPAIWIDTGIHSREWVTQASGVWFAKKITQDYGQDAAFTAILDTLDIFLEIVTNPDGFAFTHSTNRMWRKTRSHTAGSLCIGVDPNRNWDAGFGLSGASSNPCSETYHGKFANSEVEVKSIVDFVKDHGNIKAFISIHSYSQLLMYPYGYKTEPVPDQDELDQLSKAAVTALASLYGTKFNYGSIIKAIYQASGSTIDWTYSQGIKYSFTFELRDTGRYGFLLPASQIIPTAKETWLALLTIMEHTLNHPY

SEQ ID NO: 2600 - protein, 778 aa, Homo sapiens
MTSSSPAGLEGSDLSSINTMMSAVMSVGKVTENGGSPQGIKSPSKPPGPNRIGRRNQETKEEKSSYNCPLCEKICTTQHQLTMHIRQHNTDTGGADHSCSICGKSLSSASSLDRHMLVHSGERPYKCTVCGQSFTTNGNMHRHMKIHEKDPNSATATAPPSPLKRRRLSSKRKLSHDAESEREDPAPAKKMVEDGQSGDLEKKADEVFHCPVCFKEFVCKYGLETHMETHSDNPLRCDICCVTFRTHRGLLRHNALVHKQLPRDAMGRPFIQNNPSIPAGFHDLGFTDFSCRKFPRISQAWCETNLRRCISEQHRFVCDTCDKAFPMLCSLALHKQTHVAADQGQEKPQATPLPGDALDQKGFLALLGLQHTKDVRPAPAEEPLPDDNQAIQLQTLKCQLPQDPGCTNLLSLSPFEAASLGGSLTVLPATKDSIKHLSLQPFQKGFIIQPDSSIVVKPISGESAIELADIQQILKMAASAPPQISLPPFSKAPAAPLQAIFKHMPPLKPKPLVTPRTVVATSTPPPLINAQQASPGCISPSLPPPPLKLLKGSVEAASNAHLLQSKSGTQPHAATRLSLQQPRAELPGQPEMKTQLEQDSIIEALLPLSMEAKIKQEITEGELKAFMTAPGGKKTPAMRKVLYPCRFCNQVFAFSGVLRAHVRSHLGISPYQCNICDYIAADKAALIRHLRTHSGERPYICKICHYPFTVKANCERHLRKKHLKATRKDIEKNIEYVSSSAAELVDAFCAPDTVCRLCGEDLKHYRALRIHMRTHCGR

SEQ ID NO: 2601 - protein, 574 aa, Homo sapiens
MSLSPPCFTEEDRFSLEALQTIHKQMDDDKDGGIEVEESDEFIREDMKYKDATNKHSHLHREDKHITIEDLWKRWKTSEVHNWTLEDTLQWLIEFVELPQYEKNFRDNNVKGTTLPRIAVHEPSFMISQLKISDRSHRQKLQLKALDVVLFGPLTRPPHNWMKDFILTVSIVIGVGGCWFAYTQNKTSKEHVAKMMKDLESLQTAEQSLMDLQERLEKAQEENRNVAVEKQNLERKMMDEINYAKEEACRLRELREGAECELSRRQYAEQELEQVRMALKKAEKEFELRSSWSVPDALQKWLQLTHEVEVQYYNIKRQNAEMQLAIAKDEVAASYLIQAEKIKKKRSTVFGTLHVAHSSSLDEVDHKILEAKKALSELTTCLRERLFRWQQIEKICGFQIAHNSGLPSLTSSLYSDHSWVVMPRVSIPPYPIAGGVDDLDEDTPPIVSQFPGTMAKPPGSLARSSSLCRSRRSIVPSSPQPQRAQLAPHAPHPSHPRHPHHPQHTPHSLPSPDPDILSVSSCPALYRNEEEEEAIYFSAEKQCMIIVTSKMPLLTELVLCGFWKSEGKLESCTV

SEQ ID NO: 2602 - protein, 1002 aa, Homo sapiens
MKKFNFRKVLDGLTASSPGSGSSSGSNSGGGAGSGSVHPAGTAGVLREEIQETLTSEYFQICKTVRHGFPHQPTALAFDPVQKILAIGTRTGAIRILGRPGVDCYCQHESGAAVLQLQFLINEGALVSASSDDTLHLWNLRQKRPAILHSLKFNRERITYCHLPFQSKWLYVGTERGNTHIVNIESFILSGYVIMWNKAIELSTKTHPGPVVHLSDSPRDEGKLLIGYENGTVVFWDLKSKRAELRVYYDEAIHSIDWHHEGKQFMCSHSDGSLTLWNLKSPSRPFQTTIPHGKSQREGRKSESCKPILKVEYKTCKNSEPFIIFSGGLSYDKACRRPSLTIMHGKAITVLEMDHPIVEFLTLCETPYPNEFQEPYAVVVLLEKDLIVVDLTQSNFPIFENPYPMDIHESPVTCTAYFADCPPDLILVLYSIGVKHKKQGYSNKEWPISGGAWNLGAQTYPEIIITGHADGSIKFWDASAITLQMLYKLKTSKVFEKQKVGEGKQTCEIVEEDPFAIQMIYWCPESRIFCVSGVSAYVIIYKFSRHEITTEIVSLEVRLQYDVEDIITPEPETSPPFPDLSAQLPSSRSLSGSTNTVASEGVTKDSIPCLNVKTRPVRMPPGYQAELVIQLVWVDGEPPQQITSLAVSSAYGIVAFGNCNGLAVVDFIQKTVLLSMGTIDLYRSSDLYQRQPRSPRKNKQFIAGLTELNDSPVPLELERCKSPTSDHVNGHCTSPTSQSCSSGKRLSSADVSKVNRWGPGRPPFRKAQSAACMEISLPVTTEENRENSYNRSRSSSISSIDKDSKEAITALYFMDSFARKNDSTISPCLFVGTSLGMVLIISLNLPLADEQRFTEPVMVLPSGTFLSLKGAVLTFSCMDRMGGLMQPPYEVWRDPNNIDENEKSWRRKVVMNSSSASQEIGDHQYTIICSEKQAKVFSLPSQTCLYVHNITETSFILQANVVVMCSSACLACFCANGHIMIMRYLPSYKLSGNHNNTSKVQS

SEQ ID NO: 2603 - protein, 345 aa, Homo sapiens
MGPRARPALLLLMLLQTAVLQGRLLRSHSLHYLFMGASEQDLGLSLFEALGYVDDQLFVFYDHESRRVEPRTPWVSSRISSQMWLQLSQSLKGWDHMFTVDFWTIMENHNHSKESHTLQVILGCEMQEDNSTEGYWKYGYDGQDHLEFCPDTLDWRAAEPRAWPTKLEWERHKIRARQNRAYLERDCPAQLQQLLELGRGVLDQQEGSESSSLPGKVTTLRCRALNYYPQNITMKWLKDKQPMDAKEFEPKDVLPNGDGTYQGWITLAVPPGEEQRYTCQVEHPGLDQPLIVIWEPSPSGTLVIGVISGIAVFVVILFIGILFIILRKRQGSRGAMGHYVLAERE

SEQ ID NO: 2604 - protein, 134 aa, Homo sapiens
MTCHKRYKIQKKVREHHRKLRKEAKKRGHKKPRKDPGVPNSAPFKEALLREAELRKQRLEELKQQQKLDRQKELEKKRKLETNPDIKPSNVEPMEKEFGLCKTENKAKSGKQNSKKLYCQELKKVIEASDVVLE

SEQ ID NO: 2605 - protein, 797 aa, Homo sapiens
MDERREEQIVQLLNSVQAKNDKESEAQISWFAPEDHGYGTEVSTKNTPCSENKLDIQEKKLINQEKKMFRIRNRSYIDRDSEYLLQENEPDGTLDQKLLEDLQKKKNDLRYIEMQHFREKLPSYGMQKELVNLIDNHQVTVISGETGCGKTTQVTQFILDNYIERGKGSACRIVCTQPRRISAISVAERVAAERAESCGSGNSTGYQIRLQSRLPRKQGSILYCTTGIILQWLQSDPYLSSVSHIVLDEIHERNLQSDVLMTVVKDLLNFRSDLKVILMSATLNAEKFSEYFGNCPMIHIPGFTFPVVEYLLEDVIEKIRYVPEQKEHRSQFKRGFMQGHVNRQEKEEKEAIYKERWPDYVRELRRRYSASTVDVIEMMEDDKVDLNLIVALIRYIVLEEEDGAILVFLPGWDNISTLHDLLMSQVMFKSDKFLIIPLHSLMPTVNQTQVFKRTPPGVRKIVIATNIAETSITIDDVVYVIDGGKIKETHFDTQNNISTMSAEWVSKANAKQRKGRAGRVQPGHCYHLYNGLRASLLDDYQLPEILRTPLEELCLQIKILRLGGIAYFLSRLMDPPSNEAVLLSIRHLMELNALDKQEELTPLGVHLARLPVEPHIGKMILFGALFCCLDPVLTIAASLSFKDPFVIPLGKEKIADARRKELAKDTRSDHLTVVNAFEGWEEARRRGFRYEKDYCWEYFLSSNTLQMLHNMKGQFAEHLLGAGFVSSRNPKDPESNINSDNEKIIKAVICAGLYPKVAKIRLNLGKKRKMVKVYTKTDGLVAVHPKSVNVEQTDFHY

SEQ ID NO: 2606 - protein, 96 aa, Homo sapiens
MTCHKRYKIQKKVREHHRKLRKEAKKRGHKKPRKDPGVPNSAPFKEALLREAELRKQRLEELKQQQKLDRQKELEKKRKLETNPDIKPSNVEPMEK

SEQ ID NO: 2607 - protein, 616 aa, Homo sapiens
MEKIIQVAKTSAAQAIHPGCGFLSENMEFAELCKQEGIIFIGPPPSAIRDMGIKSTSKSIMAAAGVPVVEGYHGEDQSDQCLKEHARRIGYPVMIKAVRGGGGKGMRIVRSEQEFQEQLESARREAKKSFNDDAMLIEKFVDTPRHVEVQVFGDHHGNAVYLFERDCSVQRRHQKIIEEAPAPGIKSEVRKKLGEAAVRAAKAVNYVGAGTVEFIMDSKHNFCFMEMNTRLQVEHPVTEMITGTDLVEWQLRIAAGEKIPLSQEEITLQGHAFEARIYAEDPSNNFMPVAGPLVHLSTPRADPSTRIETGVRQGDEVSVHYDPMIAKLVVWAADRQAALTKLRYSLRQYNIVGLHTNIDFLLNLSGHPEFEAGNVHTDFIPQHHKQLLLSRKAAAKESLCQAALGLILKEKAMTDTFTLQAHDQFSPFSSSSGRRLNISYTRNMTLKDGKNNVAIAVTYNHDGSYSMQIEDKTFQVLGNLYSEGDCTYLKCSVNGVASKAKLIILENTIYLFSKEGSIEIDIPVPKYLSSVSSQETQGGPLAPMTGTIEKVFVKAGDKVKAGDSLMVMIAMKMEHTIKSPKDGTVKKVFYREGAQANRHTPLVEFEEEESDKRESE

SEQ ID NO: 2608 - protein, 865 aa, Homo sapiens
MSDVSTSVQSKFARLAKKKENITYMKREQLTETDKDIAPVLDLKCKDVSAIMNKFKVLMEIQDLMFEEMRETLKNDLKAVLGGKATIPEVKNSENSSSRTEFQQIINLALQKTGMVGKIEGENSKIGDDNENLTFKLEVNELSGKLDNTNEYNSNDGKKLPQGESRSYEVMGSMEETLCNIDDRDGNRNVHLEFTERESRKDGEDEFVKEMREERKFQKLKNKEEVLKASREEKVLMDEGAVLTLVADLSSATLDISKQWSNVFNILRENDFEPKFLCEVKLAFKCDGEIKTFSDLQSLRKFASQKSSVKELLKDVLPQKEEINQGGRKYGIQEKRDKTLIDSKHRAGEITSDGLSFLFLKEVKVAKPEEMKNLETQEEEFSELEELDEEASGMEDDEDTSGLEEEEEEPSGLEEEEEEEASGLEEDEASGLEEEEEQTSEQDSTFQGHTLVDAKHEVEITSDGMETTFIDSVEDSESEEEEEGKSSETGKVKTTSLTEKKASRRQKEIPFSYLVGDSGKKKLVKHQVVHKTQEEEETAVPTSQGTGTPCLTLCLASPSKSLEMSHDEHKKHSHTNLSISTGVTKLKKTEEKKHRTLHTEELTSKEADLTEETEENLRSSVINSIREIKEEIGNLKSSHSGVLEIENSVDDLSSRMDILEERIDSLEDQIEEFSKDTMQMTKQIISKERQRDIEERSRSCNIRLIGIPEKESYENRAEDIIKEIIDENFAELKKGSSLEIVSACRVPSKIDEKRLTPRHILVKFWNSSDKEKIIRASRERREITYQGTRIRLTADLSLDTLDARSKWSNVFKVLLEKGFNPRILYPAKMAFDFRGKTKVFLSIEEFRDYVLHMPTLRELLGNNIP

SEQ ID NO: 2609 - protein, 73 aa, Homo sapiens
MKVDREERANLSSQALQMSLDYGFVTPLTSMSIRGMADQDGLKPTIDKPSEDSPPLEMLGPRRTPIPSGCQTE

SEQ ID NO: 2610 - protein, 115 aa, Homo sapiens
MHSTQDKSLHLEGDPNPSAAPTSTCAPRKMPKRISISKQLASVKALRKCSDLEKAIATTALIFRNSSDSDGKLEKAIAKDLLQTQFRNFAEPCEDSRRSWPSAKLEESTLSRHWI

SEQ ID NO: 2611 - protein, 352 aa, Homo sapiens
MKMASFLAFLLLNFRVCLLLLQLLMPHSAQFSVLGPSGPILAMVGEDADLPCHLFPTMSAETMELKWVSSSLRQVVNVYADGKEVEDRQSAPYRGRTSILRDGITAGKAALRIHNVTASDSGKYLCYFQDGDFYEKALVELKVAALGSDLHVDVKGYKDGGIHLECRSTGWYPQPQIQWSNNKGENIPTVEAPVVADGVGLYAVAASVIMRGSSGEGVSCTIRSSLLGLEKTASISIADPFFRSAQRWIAALAGTLPVLLLLLGGAGYFLWQQQEEKKTQFRKKKREQELREMAWSTMKQEQSTRVKLLEELRWRSIQYASRGERHSAYNEWKKALFKPGEEMLQMRLHFVK

SEQ ID NO: 2612 - protein, 1162 aa, Homo sapiens
MKKFNFRKVLDGLTASSPGSGSSSGSNSGGGAGSGSVHPAGTAGVLREEIQETLTSEYFQICKTVRHGFPHQPTALAFDPVQKILAIGTRTGAIRILGRPGVDCYCQHESGAAVLQLQFLINEGALVSASSDDTLHLWNLRQKRPAILHSLKFNRERITYCHLPFQSKWLYVGTERGNTHIVNIESFILSGYVIMWNKAIELSTKTHPGPVVHLSDSPRDEGKLLIGYENGTVVFWDLKSKRAELRVYYDEAIHSIDWHHEGKQFMCSHSDGSLTLWNLKSPSRPFQTTIPHGKSQREGRKSESCKPILKVEYKTCKNSEPFIIFSGGLSYDKACRRPSLTIMHGKAITVLEMDHPIVEFLTLCETPYPNEFQEPYAVVVLLEKDLIVVDLTQSNFPIFENPYPMDIHESPVTCTAYFADCPPDLILVLYSIGVKHKKQGYSNKEWPISGGAWNLGAQTYPEIIITGHADGSIKFWDASAITLQMLYKLKTSKVFEKQKVGEGKQTCEIVEEDPFAIQMIYWCPESRIFCVSGVSAYVIIYKFSRHEITTEIVSLEVRLQYDVEDIITPEPETSPPFPDLSAQLPSSRSLSGSTNTVASEGVTKDSIPCLNVKTRPVRMPPGYQAELVIQLVWVDGEPPQQITSLAVSSAYGIVAFGNCNGLAVVDFIQKTVLLSMGTIDLYRSSDLYQRQPRSPRKNKQFIAGLTELNDSPVPLELERCKSPTSDHVNGHCTSPTSQSCSSGKRLSSADVSKVNRWGPGRPPFRKAQSAACMEISLPVTTEENRENSYNRSRSSSISSIDKDSKEAITALYFMDSFARKNDSTISPCLFVGTSLGMVLIISLNLPLADEQRFTEPVMVLPSGTFLSLKGAVLTFSCMDRMGGLMQPPYEVWRDPNNIDENEKSWRRKVVMNSSSASQEIGDHQYTIICSEKQAKVFSLPSQTCLYVHNITETSFILQANVVVMCSSACLACFCANGHIMIMSLPSLRPMLDVNYLPLTDMRIARTFCFTNEGQALYLVSPTEIQRLTYSQEMCDNLQDMLGDLFTPIETPEAQNRGFLKGLFGGSGQTFDREELFGEASAGKASRSLAQHIPGPGSIEGMKGAAGGVMGELTRARIALDERGQRLGELEEKTAGMMTSAEAFSKHAHELMLKYKDKKWYQF

SEQ ID NO: 2613 - protein, 166 aa, Homo sapiens
MGGCMHSTQDKSLHLEGDPNPSAAPTSTCAPRKMPKRISISKQLASVKALRKCSDLEKAIATTALIFRNSSDSDGKLEKAIAKDLLQTQFRNFAELPFTFYHEWKQPEVLTTCRCLILNFPAIRIGQETKPKYREILSELDEHTENKLDFEDFMILLLSITVMSDL

SEQ ID NO: 2614 - protein, 144 aa, Homo sapiens
MGSNLSPQLCLMPFILGLLSGGVTTTPWSLARPQGSCSLEGVEIKGGSFRLLQEGQALEYVCPSGFYPYPVQTRTCRSTGSWSTLKTQDQKTVRKAECRAIHCPRPHDFENGEYWPRSPYYNVSDEISFHCYDGYTLRGSANRT

SEQ ID NO: 2615 - protein, 347 aa, Homo sapiens
EINYAKEEACRLRELREGAECELSRRQYAEQELEQVRMALKKAEKEFELRSSWSVPDALQKWLQLTHEVEVQYYNIKRQNAEMQLAIAKDEAEKIKKKRSTVFGTLHVAHSSSLDEVDHKILEAKKALSELTTCLRERLFRWQQIEKICGFQIAHNSGLPSLTSSLYSDHSWVVMPRVSIPPYPIAGGVDDLDEDTPPIVSQFPGTMAKPPGSLARSSSLCRSRRSIVPSSPQPQRAQLAPHAPHPSHPRHPHHPQHTPHSLPSPDPDILSVSSCPALYRNEEEEEAIYFSAEKQWNTRECAVGDSQGPHVHGLVRFDKDFGSYSEYERKHWEVSRKCQTQLQNVTP

SEQ ID NO: 2616 - protein, 1129 aa, Homo sapiens
MKKFNFRKVLDGLTASSPGSGSSSGSNSGGGAGSGSVHPAGTAGVLREEIQETLTSEYFQICKTVRHGFPHQPTALAFDPVQKILAIGTRTGAIRILGRPGVDCYCQHESGAAVLQLQFLINEGALVSASSDDTLHLWNLRQKRPAILHSLKFNRERITYCHLPFQSKWLYVGTERGNTHIVNIESFILSGYVIMWNKAIELSTKTHPGPVVHLSDSPRDEGKLLIGYENGTVVFWDLKSKRAELRVYYDEAIHSIDWHHEGKQFMCSHSDGSLTLWNLKSPSRPFQTTIPHGKSQREGRKSESCKPILKVEYKTCKNSEPFIIFSGGLSYDKACRRPSLTIMHGKAITVLEMDHPIVEFLTLCETPYPNEFQEPYAVVVLLEKDLIVVDLTQSNFPIFENPYPMDIHESPVTCTAYFADCPPDLILVLYSIGVKHKKQGYSNKEWPISGGAWNLGAQTYPEIIITGHADGSIKFWDASAITLQMLYKLKTSKVFEKQKVGEGKQTCEIVEEDPFAIQMIYWCPESRIFCVSGVSAYVIIYKFSRHEITTEIVSLEVRLQYDVEDIITPEPETSPPFPDLSAQLPSSRSLSGSTNTVASEGVTKDSIPCLNVKTRPVRMPPGYQAELVIQLVWVDGEPPQQITSLAVSSAYGIVAFGNCNGLAVVDFIQKTVLLSMGTIDLYRSSDLYQRQPRSPRKNKQFIADNFCMRGLSNFYPDLTKRIRTSYQSLTELNDSPVPLELERCKSPTSENRENSYNRSRSSSISSIDKDSKEAITALYFMDSFARKNDSTISPCLFVGTSLGMVLIISLNLPLADEQRFTEPVMVLPSGTFLSLKGAVLTFSCMDRMGGLMQPPYEVWRDPNNIDENEKSWRRKVVMNSSSASQEIGDHQYTIICSEKQAKVFSLPSQTCLYVHNITETSFILQANVVVMCSSACLACFCANGHIMIMSLPSLRPMLDVNYLPLTDMRIARTFCFTNEGQALYLVSPTEIQRLTYSQEMCDNLQDMLGDLFTPIETPEAQNRGFLKGLFGGSGQTFDREELFGEASAGKASRSLAQHIPGPGSIEGMKGAAGGVMGELTRARIALDERGQRLGELEEKTAGMMTSAEAFSKHAHELMLKYKDKKWYQF

SEQ ID NO: 2617 - protein, 156 aa, Homo sapiens
VFLDPFDACGLIVAKYFSLPSVVFARGIFCHYLEEGAQCPAPLSYVPRLLLGFSDAMTFKERVWNHIMHLEEHLFCPYFFKNVLEIASEILQTPVTAYDLYSHTSIWLLRTDFVLEYPKPVMPNMIFIGGINCHQGKPVPMGQDLLLSPHWNMSQA

SEQ ID NO: 2618 - protein, 1088 aa, Homo sapiens
MAFYSCCWVLLALTWHTSAYGPDQRAQKKGDIILGGLFPIHFGVAAKDQDLKSRPESVECIRYNFRGFRWLQAMIFAIEEINSSPALLPNLTLGYRIFDTCNTVSKALEATLSFVAQNKIDSLNLDEFCNCSEHIPSTIAVVGATGSGVSTAVANLLGLFYIPQVSYASSSRLLSNKNQFKSFLRTIPNDEHQATAMADIIEYFRWNWVGTIAADDDYGRPGIEKFREEAEERDICIDFSELISQYSDEEEIQHVVEVIQNSTAKVIVVFSSGPDLEPLIKEIVRRNITGKIWLASEAWASSSLIAMPQYFHVVGGTIGFALKAGQIPGFREFLKKVHPRKSVHNGFAKEFWEETFNCHLQEGAKGPLPVDTFLRGHEESGDRFSNSSTAFRPLCTGDENISSVETPYIDYTHLRISYNVYLAVYSIAHALQDIYTCLPGRGLFTNGSCADIKKVEAWQVLKHLRHLNFTNNMGEQVTFDECGDLVGNYSIINWHLSPEDGSIVFKEVGYYNVYAKKGERLFINEEKILWSGFSREPLTFVLSVLQVPFSNCSRDCLAGTRKGIIEGEPTCCFECVECPDGEYSDETDASACNKCPDDFWSNENHTSCIAKEIEFLSWTEPFGIALTLFAVLGIFLTAFVLGVFIKFRNTPIVKATNRELSYLLLFSLLCCFSSSLFFIGEPQDWTCRLRQPAFGISFVLCISCILVKTNRVLLVFEAKIPTSFHRKWWGLNLQFLLVFLCTFMQIVICVIWLYTAPPSSYRNQELEDEIIFITCHEGSLMALGFLIGYTCLLAAICFFFAFKSRKLPENFNEAKFITFSMLIFFIVWISFIPAYASTYGKFVSAVEVIAILAASFGLLACIFFNKIYIILFKPSRNTIEEVRCSTAAHAFKVAARATLRRSNVSRKRSSSLGGSTGSTPSSSISSKSNSEDPFPQPERQKQQQPLALTQQEQQQQPLTLPQQQRSQQQPRCKQKVIFGSGTVTFSLSFDEPQKNAMAHRNSTHQNSLEAQKSSDTLTRHEPLLPLQCGETDLDLTVQETGLQGPVGGDQRPEVEDPEELSPALVVSSSQSFVISGGGSTVTENVVNS

SEQ ID NO: 2619 - protein, 629 aa, Homo sapiens
MGNLKSVAQEPGPPCGLGLGLGLGLCGKQGPATPAPEPSRAPASLLPPAPEHSPPSSPLTQPPEGPKFPRVKNWEVGSITYDTLSAQAQQDGPCTPRRCLGSLVFPRKLQGRPSPGPPAPEQLLSQARDFINQYYSSIKRSGSQAHEQRLQEVEAEVAATGTYQLRESELVFGAKQAWRNAPRCVGRIQWGKLQVFDARDCRSAQEMFTYICNHIKYATNRGNLRSAITVFPQRCPGRGDFRIWNSQLVRYAGYRQQDGSVRGDPANVEITELCIQHGWTPGNGRFDVLPLLLQAPDDPPELFLLPPELVLEVPLEHPTLEWFAALGLRWYALPAVSNMLLEIGGLEFPAAPFSGWYMSTEIGTRNLCDPHRYNILEDVAVCMDLDTRTTSSLWKDKAAVEINVAVLHSYQLAKVTIVDHHAATASFMKHLENEQKARGGCPADWAWIVPPISGSLTPVFHQEMVNYFLSPAFRYQPDPWKGSAAKGTGITRKKTFKEVANAVKISASLMGTVMAKRVKATILYGSETGRAQSYAQQLGRLFRKAFDPRVLCMDEYDVVSLEHETLVLVVTSTFGNGDPPENGEGLTLWPRLECSSTITAHCSLNLLDSSNPPTSTSQVVGTTGACHDA

SEQ ID NO: 2620 - protein, 217 aa, Homo sapiens
MDPQCTMGLSNILFVMAFLLSANFSQPEIVPISNITENVYINLTCSSIHGYPEPKKMSVLLRTKNSTIEYDGVMQKSQDNVTELYDVSISLSVSFPDVTSNMTIFCILETDKTRLLSSPFSIELEDPQPPPDHIPWITAVLPTVIICVMVFCLILWKWKKKKRPRNSYKCGTNTMEREESEQTKKREKIHIPERSDEAQRVFKSSKTSSCDKSDTCF

SEQ ID NO: 2621 - protein, 983 aa, Homo sapiens
MDTEPNPGTSSVSTTTSSTTTTTITTSSSRMQQPQISVYSGSDRHAVQVIQQALHRPPSSAAQYLQQMYAAQQQHLMLHTAALQQQHLSSSQLQSLAAVQASLSSGRPSTSPTGSVTQQSSMSQTSINLSTSPTPAQLISRSQASSSTSGSITQQTMLLGSTSPTLTASQAQMYLRAQMLIFTPATTVAAVQSDIPVVSSSSSSSCQSAATQVQNLTLRSQKLGVLSSSQNGPPKSTSQTQSLTICHNKTTVTSSKISQRDPSPESNKKGESPSLESRSTAVTRTSSIHQLIAPASYSPIQPHSLIKHQQIPLHSPPSKVSHHQLILQQQQQQIQPITLQNSTQDPPPSQHCIPLQNHGLPPAPSNAQSQHCSPIQSHPSPLTVSPNQSQSAQQSVVVSPPPPHSPSQSPTIIIHPQALIQPHPLVSSALQPGPNLQQSTANQVQATAQLNLPSHLPLPASPVVHIGPVQQSALVSPGQQIVSPSHQQYSSLQSSPIPIASPPQMSTSPPAQIPPLPLQSMQSLQVQPEILSQGQVLVQNALVSEEELPAAEALVQLPFQTLPPPQTVAVNLQVQPPAPVDPPVVYQVEDVCEEEMPEESDECVRMDRTPPPPTLSPAAITVGRGEDLTSEHPLLEQVELPAVASVSASVIKSPSDPSHVSVPPPPLLLPAATTRSNSTSMHSSIPSIENKPPQAIVKPQILTHVIEGFVIQEGLEPFPVSRSSLLIEQPVKKRPLLDNQVINSVCVQPELQNNTKHADNSSDTEMEDMIAEETLEEMDSELLKCEFCGKMGYANEFLRSKRFCTMSCAKRYNVSCSKKFALSRWNRKPDNQSLGHRGRRPSGPDGAAREHILRQLPITYPSAEEDLASHEDSVPSAMTTRLRRQSERERERELRDVRIRKMPENSDLLPVAQTEPSIWTVDDVWAFIHSLPGCQDIADEFRAQEIDGQALLLLKEDHLMSAMNIKLGPALKICARINSLKES

SEQ ID NO: 2622 - protein, 1000 aa, Homo sapiens
MKKFNFRKVLDGLTASSPGSGSSSGSNSGGGAGSGSVHPAGTAGVLREEIQETLTSEYFQICKTVRHGFPHQPTALAFDPVQKILAIGTRTGAIRILGRPGVDCYCQHESGAAVLQLQFLINEGALVSASSDDTLHLWNLRQKRPAILHSLKFNRERITYCHLPFQSKWLYVGTERGNTHIVNIESFILSGYVIMWNKAIELSTKTHPGPVVHLSDSPRDEGKLLIGYENGTVVFWDLKSKRAELRVYYDEAIHSIDWHHEGKQFMCSHSDGSLTLWNLKSPSRPFQTTIPHGKSQREGRKSESCKPILKVEYKTCKNSEPFIIFSGGLSYDKACRRPSLTIMHGKAITVLEMDHPIVEFLTLCETPYPNEFQEPYAVVVLLEKDLIVVDLTQSNFPIFENPYPMDIHESPVTCTAYFADCPPDLILVLYSIGVKHKKQGYSNKEWPISGGAWNLGAQTYPEIIITGHADGSIKFWDASAITLQMLYKLKTSKVFEKQKVGEGKQTCEIVEEDPFAIQMIYWCPESRIFCVSGVSAYVIIYKFSRHEITTEIVSLEVRLQYDVEDIITPEPETSPPFPDLSAQLPSSRSLSGSTNTVASEGVTKDSIPCLNVKTRPVRMPPGYQAELVIQLVWVDGEPPQQITSLAVSSAYGIVAFGNCNGLAVVDFIQKTVLLSMGTIDLYRSSDLYQRQPRSPRKNKQFIADNFCMRGLSNFYPDLTKRIRTSYQSLTELNDSPVPLELERCKSPTSGLATRTPESALGFYRNEISAMRQRNQVYHLPENRENSYNRSRSSSISSIDKDSKEAITALYFMDSFARKNDSTISPCLFVGTSLGMVLIISLNLPLADEQRFTEPVMVLPSGTFLSLKGAVLTFSCMDRMGGLMQPPYEVWRDPNNIDENEKSWRRKVVMNSSSASQEIGDHQYTIICSEKQAKVFSLPSQTCLYVHNITETSFILQANVVVMCSSACLACFCANGHIMIMRYLPSYKLSGNHNNTSKVQS

SEQ ID NO: 2623 - protein, 995 aa, Homo sapiens
MAEAEFKDHSTAMDTEPNPGTSSVSTTTSSTTTTTITTSSSRMQQPQISVYSGSDRHAVQVIQQALHRPPSSAAQYLQQMYAAQQQHLMLHTAALQQQHLSSSQLQSLAAVQASLSSGRPSTSPTGSVTQQSSMSQTSINLSTSPTPAQLISRSQASSSTSGSITQQTMLLGSTSPTLTASQAQMYLRAQMLIFTPATTVAAVQSDIPVVSSSSSSSCQSAATQVQNLTLRSQKLGVLSSSQNGPPKSTSQTQSLTICHNKTTVTSSKISQRDPSPESNKKGESPSLESRSTAVTRTSSIHQLIAPASYSPIQPHSLIKHQQIPLHSPPSKVSHHQLILQQQQQQIQPITLQNSTQDPPPSQHCIPLQNHGLPPAPSNAQSQHCSPIQSHPSPLTVSPNQSQSAQQSVVVSPPPPHSPSQSPTIIIHPQALIQPHPLVSSALQPGPNLQQSTANQVQATAQLNLPSHLPLPASPVVHIGPVQQSALVSPGQQIVSPSHQQYSSLQSSPIPIASPPQMSTSPPAQIPPLPLQSMQSLQVQPEILSQGQVLVQNALVSEEELPAAEALVQLPFQTLPPPQTVAVNLQVQPPAPVDPPVVYQVEDVCEEEMPEESDECVRMDRTPPPPTLSPAAITVGRGEDLTSEHPLLEQVELPAVASVSASVIKSPSDPSHVSVPPPPLLLPAATTRSNSTSMHSSIPSIENKPPQAIVKPQILTHVIEGFVIQEGLEPFPVSRSSLLIEQPVKKRPLLDNQVINSVCVQPELQNNTKHADNSSDTEMEDMIAEETLEEMDSELLKCEFCGKMGYANEFLRSKRFCTMSCAKRYNVSCSKKFALSRWNRKPDNQSLGHRGRRPSGPDGAAREHILRQLPITYPSAEEDLASHEDSVPSAMTTRLRRQSERERERELRDVRIRKMPENSDLLPVAQTEPSIWTVDDVWAFIHSLPGCQDIADEFRAQEIDGQALLLLKEDHLMSAMNIKLGPALKICARINSLKES

SEQ ID NO: 2624 - protein, 138 aa, Homo sapiens
MKRPKLKKASKRMTCHKRYKIQKKVREHHRKLRKEAKKRGHKKPRKDPGVPNSAPFKEALLREAELRKQRLEELKQQQKLDRQKELEKKRKLETNPDIKPSNVEPMEKEFGLCKTENKAKSGKQNSKKLYCQELKKVS

SEQ ID NO: 2625 - protein, 125 aa, Homo sapiens
MAVFLQLLPLLLSRAQGNPGASLDGRPGDRVNLSCGGVSHPIRWVWAPSFPACKGLSKGRRPILWASSSGTPTVPPLQPFVGRLRSLDSAPDPAAGRWVGARTGSFGPGLVAAQAPAPATDSTTP

SEQ ID NO: 2626 - protein, 1299 aa, Homo sapiens
AVPTNGTVNNVAQEPVNTLGDISGNKTPDLSNQNSSDQANEEWETASESSDFNERRERDEKKNADLNAQTVVKVGENVLPPKREIAKRSFSSQRPVDRQNRRGNNGPPKSGRNFSGPRNERRSGPPSKSGKRGPFDDQPAGTTGVDLINGSSAHHQEGVPNGTGQKNSKDSTGKKREDPKPGPKKPKEKVDALSQFDLNNYASVVIIDDHPEVTVIEDPQSNLNDDGFTEVVSKKQQKRLQDEERRKKEEQVIQVWNKKNANEKGRSQTSKLPPRFAKKQATGIQQAQSSASVPPLASAPLPPSTSASVPASTSAPLPATLTPVPASTSAPVPASTLAPVLASTSAPVPASPLAPVSASASVSASVPASTSAAAITSSSAPASAPAPTPILASVSTPASVTILASASIPILASALASTSAPTPAPAASSPAAPVITAPTIPASAPTASVPLAPASASAPAPAPTPVSAPNPAPPAPAQTQAQTHKPVQNPLQTTSQSSKQPPPSIRLPSAQTPNGTDYVASGKSIQTPQSHGTLTAELWDNKVAPPAVLNDISKKLGPISPPQPPSVSAWNKPLTSFGSAPSSEGAKNGQESGLEIGTDTIQFGAPASNGNENEVVPVLSEKSADKIPEPKEQRQKQPRAGPIKAQKLPDLSPVENKEHKPGPIGKERSLKNRKVKDAQQVEPEGQEKPSPATVRSTDPVTTKETKAVSEMSTEIGTMISVSSAEYGTNAKMESARKAWENSPNVREKGSPVTSTAPPIATGVSSSASGPSTANYNSFSSASMPQIPVASVTPTASLSGAGTYTTSSLSTKSTTTSDPPNICKVKPQQLQTSSLPSASHFSQLSCMPSLIAQQQQNPQVYVSQSAAAQIPAFYMDTSHLFNTQHARLAPPSLAQQQGFQPGLSQPTSVQQIPIPIYAPLQGQHQAQLSLGAGPAVSQAQELFSSSLQPYRSQPAFMQSSLSQPSVVLSGTAIHNFPTVQHQELAKAQSGLAFQQTSNTQPIPILYEHQLGQASGLGGSQLIDTHLLQARANLTQASNLYSGQVQQPGQTNFYNTAQSPSALQQVTVPLPASQLSLPNFGSTGQPLIALPQTLQPPLQHTTPQAQAQSLSRPAQVSQPFRGLIPAGTQHSMIATTGKMSEMELKAFGSGIDIKPGTPPIAGRSTTPTSSPFRATSTSPNSQSSKMNSIVYQKQFQSAPATVRMTQPFPTQFAPQAKQRAEVLQSTQRFFSEQQQSKQIGGGKAQKVDSDSSKPPETLTDPPGVCQEKVEEKPPPAPSIATKPVRTGPIKPQAIKTEETKS

SEQ ID NO: 2627 - protein, 598 aa, Homo sapiens
MAAASAVSVLLVAAERNRWHRLPSLLLPPRTWVWRQRTMKYTTATDEAYSIGPAPSQQSYLSMEKIIQVAKTSAAQAIHPGCGFLSENMEFAELCKQEGIIFIGPPPSAIRDMGIKSTSKSIMAAAGVPVVEGYHGEDQSDQCLKEHARRIGYPVMIKAVRGGGGKGMRIVRSEQEFQEQLESARREAKKSFNDDAMLIEKFVDTPRHVEVQVFGDHHGNAVYLFERDCSVQRRHQKIIEEAPAPGIKSEVRKKLGEAAVRAAKAVNYVGAGTVEFIMDSKHNFCFMEMNTRLQVEHPVTEMITGTDLVEWQLRIAAGEKIPLSQEEITLQGHAFEARIYAEDPSNNFMPVAGPLVHLSTPRADPSTRIETGVRQGDEVSVHYDPMIAKLVVWAADRQAALTKLRYSLRQYNIVGLHTNIDFLLNLSGHPEFEAGNVHTDFIPQHHKQLLLSRKAAAKESLCQAALGLILKEKAMTDTFTLQAHDQFSPFSSSSGRRLNISYTRNMTLKDGKNNVAIAVTYNHDGSYSMQIEDKTFQVLGNLYSEGDCTYLKCSVNGVASKAKLIILENTIYLFSKEGSIEIDIPVPKYLSSVSSQET

SEQ ID NO: 2628 - protein, 614 aa, Homo sapiens
MGNLKSVAQEPGPPCGLGLGLGLGLCGKQGPATPAPEPSRAPASLLPPAPEHSPPSSPLTQPPEGPKFPRVKNWEVGSITYDTLSAQAQQDGPCTPRRCLGSLVFPRKLQGRPSPGPPAPEQLLSQARDFINQYYSSIKRSGSQAHEQRLQEVEAEVAATGTYQLRESELVFGAKQAWRNAPRCVGRIQWGKLQVFDARDCRSAQEMFTYICNHIKYATNRGNLRSAITVFPQRCPGRGDFRIWNSQLVRYAGYRQQDGSVRGDPANVEITELCIQHGWTPGNGRFDVLPLLLQAPDDPPELFLLPPELVLEVPLEHPTLEWFAALGLRWYALPAVSNMLLEIGGLEFPAAPFSGWYMSTEIGTRNLCDPHRYNILEDVAVCMDLDTRTTSSLWKDKAAVEINVAVLHSYQLAKVTIVDHHAATASFMKHLENEQKARGGCPADWAWIVPPISGSLTPVFHQEMVNYFLSPAFRYQPDPWKGSAAKGTGITRKKTFKEVANAVKISASLMGTVMAKRVKATILYGSETGRAQSYAQQLGRLFRKAFDPRVLCMDEYDVVSLEHETLVLVVTSTFGNGDPPENGERWGFAMLPRLVSNSWVQAIHLPRPPKVLRL

SEQ ID NO: 2629 - protein, 246 aa, Homo sapiens
MGPRARPALLLLMLLQTAVLQGRLLQSHTLQVILGCEMQEDNSTEGYWKYGYDGQDHLEFCPDTLDWRAAEPRAWPTKLEWERHKIRARQNRAYLERDCPAQLQQLLELGRGVLDQQVTTLRCRALNYYPQNITMKWLKDKQPMDAKEFEPKDVLPNGDGTYQGWITLAVPPGEEQRYTCQVEHPGLDQPLIVIWEPSPSGTLVIGVISGIAVFVVILFIGILFIILRKRQGSRGAMGHYVLAERE

SEQ ID NO: 2630 - protein, 1026 aa, Homo sapiens
MKKFNFRKVLDGLTASSPGSGSSSGSNSGGGAGSGSVHPAGTAGVLREEIQETLTSEYFQICKTVRHGFPHQPTALAFDPVQKILAIGTRTGAIRILGRPGVDCYCQHESGAAVLQLQFLINEGALVSASSDDTLHLWNLRQKRPAILHSLKFNRERITYCHLPFQSKWLYVGTERGNTHIVNIESFILSGYVIMWNKAIELSTKTHPGPVVHLSDSPRDEGKLLIGYENGTVVFWDLKSKRAELRVYYDEAIHSIDWHHEGKQFMCSHSDGSLTLWNLKSPSRPFQTTIPHGKSQREGRKSESCKPILKVEYKTCKNSEPFIIFSGGLSYDKACRRPSLTIMHGKAITVLEMDHPIVEFLTLCETPYPNEFQEPYAVVVLLEKDLIVVDLTQSNFPIFENPYPMDIHESPVTCTAYFADCPPDLILVLYSIGVKHKKQGYSNKEWPISGGAWNLGAQTYPEIIITGHADGSIKFWDASAITLQMLYKLKTSKVFEKQKVGEGKQTCEIVEEDPFAIQMIYWCPESRIFCVSGVSAYVIIYKFSRHEITTEIVSLEVRLQYDVEDIITPEPETSPPFPDLSAQLPSSRSLSGSTNTVASEGVTKDSIPCLNVKTRPVRMPPGYQAELVIQLVWVDGEPPQQITSLAVSSAYGIVAFGNCNGLAVVDFIQKTVLLSMGTIDLYRSSDLYQRQPRSPRKNKQFIADNFCMRGLSNFYPDLTKRIRTSYQSLTELNDSPVPLELERCKSPTSDHVNGHCTSPTSQSCSSGKRLSSADVSKVNRWGPGRPPFRKAQSAACMEISLPVTTEENRENSYNRSRSSSISSIDKDSKEAITALYFMDSFARKNDSTISPCLFVGTSLGMVLIISLNLPLADEQRFTEPVMVLPSGTFLSLKGAVLTFSCMDRMGGLMQPPYEVWRDPNNIDENEKSWRRKVVMNSSSASQEIGDHQYTIICSEKQAKVFSLPSQTCLYVHNITETSFILQANVVVMCSSACLACFCANGHIMIMRYLPSYKLSGNHNNTSKVQS

SEQ ID NO: 2631 - protein, 394 aa, Homo sapiens
MENTDSDNLLRRAACQEAQVFGNQLIPPNAQVKKATVFLNPAACKGKARTLFEKNAAPILHLSGMDVTIVKTDYEGQAKKLLELMENTDVIIVAGGDGTLQEVVTGVLRRTDEATFSKIPIGFIPLGETSSLSHTLFAESGNKVQHITDATLAIVKGETVPLDVLQIKGEKEQPVFAMTGLRWGSFRDAGVKVSKYWYLGPLKIKAAHFFSTLKEWPQTHQASISYTGPTERPPNEPEETPVQRPSLYRRILRRLASYWAQPQDALSQEVSPEVWKDVQLSTIELSITTRNNQLDPTSKEDFLNICIEPDTISKGDFITIGSRKVRNPKLHVEGTECLQASQCTLLIPEGAGGSFSIDSEEYEAMPVEVKLLPRKLQFFCDPRKREQMLTSPTQ

SEQ ID NO: 2632 - protein, 334 aa, Homo sapiens
MGPRARPALLLLMLLQTAVLQGRLLRSHSLHYLFMGASEQDLGLSLFEALGYVDDQLFVFYDHESRRVEPRTPWVSSRISSQMWLQLSQSLKGWDHMFTVDFWTIMENHNHSKESHTLQVILGCEMQEDNSTEGYWKYGYDGQDHLEFCPDTLDWRAAEPRAWPTKLEWERHKIRARQNRAYLERDCPAQLQQLLELGRGVLDQQVTTLRCRALNYYPQNITMKWLKDKQPMDAKEFEPKDVLPNGDGTYQGWITLAVPPGEEQRYTCQVEHPGLDQPLIVIWEPSPSGTLVIGVISGIAVFVVILFIGILFIILRKRQGSRGAMGHYVLAERE

SEQ ID NO: 2633 - protein, 320 aa, Homo sapiens
MPRLRVHGACLPTKSVLFLFYHRLTMLREASDEIVAEKEAEVKLPEDSSCTEDLSSCTSVPEMNEDGNRKESNCAKDLRSQPPTRIPTLVDKETNTDEAANDNMAVRPKERSSLSSRQHPFVRSSVIVRSQTFSPGERNQYICRLNRSDSDSSTLAKKSLFVRNSTERRSLRVKRTVCQSVLRRTTQECPVRTSLDLELDLQASLTRQSRLNDELQALRDLRQKLEELKAQGETDLPPGVLEDERFQRLLKQAEKQAEQSKEEQKQGLNAEKLMRQVSKDVCRLREQSQKVPRQVQSFREKIAYFTRAKISIPSLPADDV

SEQ ID NO: 2634 - protein, 115 aa, Homo sapiens
MFPPSGSTGLIPPSHFQARPLSTLPRMAPTWLSDIPLVQPPGHQDVSERRLDTQRPQVTMWERDVSSDRQEPGRRGRSWGLEGSQALSQQAEVIVRQLQELRRLEEEVRLLRETS

SEQ ID NO: 2635 - protein, 1580 aa, Homo sapiens
MWPSQLLIFMMLLAPIIHGGKHSERHPALAAPLRHAERSPGGALPPRHLLQQPAAERTAAHRGQGPRGATRGVRGPGAQGAQIAAQAFSRAPIPMAVVRRELSCESYPIELRCPGTDVIMIESANYGRTDDKICDSDPAQMENIRCYLPDAYKIMSQRCNNRTQCAVVAGPDVFPDPCPGTYKYLEVQYECVPYKVEQKVFLCPGLLKGVYQSEHLFESDHQSGAWCKDPLQASDKIYYMPWTPYRTDTLTEYSSKDDFIAGRPTTTYKLPHRVDGTGFVVYDGALFFNKERTRNIVKFDLRTRIKSGEAIIANANYHDTSPYRWGGKSDIDLAVDENGLWVIYATEQNNGKIVISQLNPYTLRIEGTWDTAYDKRSASNAFMICGILYVVKSVYEDDDNEATGNKIDYIYNTDQSKDSLVDVPFPNSYQYIAAVDYNPRDNLLYVWNNYHVVKYSLDFGPLDSRSGQAHHGQVSYISPPIHLDSELERPSVKDISTTGPLGMGSTTTSTTLRTTTLSPGRSTTPSVSGRRNRSTSTPSPAVEVLDDMTTHLPSASSQIPALEESCEAVEAREIMWFKTRQGQIAKQPCPAGTIGVSTYLCLAPDGIWDPQGPDLSNCSSPWVNHITQKLKSGETAANIARELAEQTRNHLNAGDITYSVRAMDQLVGLLDVQLRNLTPGGKDSAARSLNKLQKRERSCRAYVQAMVETVNNLLQPQALNAWRDLTTSDQLRAATMLLHTVEESAFVLADNLLKTDIVRENTDNIKLEVARLSTEGNLEDLKFPENMGHGSTIQLSANTLKQNGRNGEIRVAFVLYNNLGPYLSTENASMKLGTEALSTNHSVIVNSPVITAAINKEFSNKVYLADPVVFTVKHIKQSEENFNPNCSFWSYSKRTMTGYWSTQGCRLLTTNKTHTTCSCNHLTNFAVLMAHVEVKHSDAVHDLLLDVITWVGILLSLVCLLICIFTFCFFRGLQSDRNTIHKNLCISLFVAELLFLIGINRTDQPIACAVFAALLHFFFLAAFTWMFLEGVQLYIMLVEVFESEHSRRKYFYLVGYGMPALIVAVSAAVDYRSYGTDKVCWLRLDTYFIWSFIGPATLIIMLNVIFLGIALYKMFHHTAILKPESGCLDNINYEDNRPFIKSWVIGAIALLCLLGLTWAFGLMYINESTVIMAYLFTIFNSLQGMFIFIFHCVLQKKVRKEYGKCLRTHCCSGKSTESSIGSGKTSGSRTPGRYSTGSQSRIRRMWNDTVRKQSESSFITGDINSSASLNRGAMANHLISNALLRPHGTNNPYNTLLGEPAVCNNPSVSMYNAQEGLLNNARDTSVMDTLPLNGNHGNSYSIASGEYLSNCVQIIDRGYNHNETALEKKILKELTSNYIPSYLNNHERSSEQNRNLMNKLVNNLGSGREDDAIVLDDATSFNHEESLGLELIHEESDAPLLPPRVYSTENHQPHHYTRRRIPQDHSESFFPLLTNEHTEDLQSPHRDSLYTSMPTLAGVAATESVTTSTQTEPPPAKCGDAEDVYYKSMPNLGSRNHVHQLHTYYQLGRGSSDGFIVPPNKDGTPPEGSSKGPAHLVTSL

SEQ ID NO: 2636 - protein, 158 aa, Homo sapiens
MFPPSGSTGLIPPSHFQARPLSTLPRMAPTWLSDIPLVQPPGHQDVSERRLDTQRPQVTMWERDVSSDRQEPGRRGRSWGLEGSQALSQQAEVIVRQLQELRRLEEEVRLLRETSLQQKMRLEAQAMELEALARAEKAGRAEAEGLRAALAGAEVVRK

SEQ ID NO: 2637 - protein, 547 aa, Homo sapiens
MSSDEEKYSLPVVQNDSSRGSSVSSNLQEEYEELLHYAIVTPNIEPCASQSSHPKGELVPDVRISTIHDILHSQESSPVLSPRKPSHPVMDFFSSHLLADSSSPATNSSHTDAHEILVSDFLVSDENLQKMENVLDLWSSGLKTNIISELSKWRLNFIDWHRMEMRKEKEKHAAHLKQLCNQINELKELQKTFEISIGRKDEVISSLSHAIGKQKEKIELMRTFFHWRIGHVRARQDVYEGKLADQYYQRTLLKKVWKVWRSVVQKQWKDVVERACQARAEEVCIQISNDYEAKVAMLSGALENAKAEIQRMQHEKEHFEDSMKKAFMRGVCALNLEAMTIFQNRNDAGIDSTNNKKEEYGPGVQGKEHSAHLDPSAPPMPLPVTSPLLPSPPAAVGGASATAVPSAASMTSTRAASASSVHVPVSALGAGSAATAASEEMYVPRVVTSAQQKAGRTITARITGRCDFASKNRISSSLAIMGVSPPMSSVVVEKHHPVTVQTIPQATAAKYPRTIHPESSTSASRSLGTRSAHTQSLTSVHSIKVVD

SEQ ID NO: 2638 - protein, 739 aa, Homo sapiens
MSCVSSYAGFDLSDPEKEKVGILAIQLKERNVVHSEIIITLLSNAVAQFKKYKCPRMKSHLMVQMGEEYYYAKDYTKALKLLDYVMCDYRSEGWWTLLTSVLTTALKCSYLMAQLKDYITYSLELLGRASTLKDDQKSRIEKNLINVLMNESPDPEPDCDILAVKTAQKLWADRISLAGSNIFTIGVQDFVPFVQCKAKFHAPSFHVDVPVQFDIYLKADCPHPIRFSKLCVSFNNQEYNQFCVIEEASKANEVLENLTQGKMCLVPGKTRKLLFKFVAKTEDVGKKIEITSVDLALGNETGRCVVLNWQGGGGDAASSQEALQAARSFKRRPKLPDNEVHWDSIIIQASTMIISRVPNISVHLLHEPPALTNEMYCLVVTVQSHEKTQIRDVKLTAGLKPGQDANLTQKTHVTLHGTELCDESYPALLTDIPVGDLHPGEQLEKMLYVRCGTVGSRMFLVYVSYLINTTVEEKEIVCKCHKDETVTIETVFPFDVAVKFVSTKFEHLERVYADIPFLLMTDLLSASPWALTIVSSELQLAPSMTTVDQLESQVDNVILQTGESASECFCLQCPSLGNIEGGVATGHYIISWKRTSAMENIPIITTVITLPHVIVENIPLHVNADLPSFGRVRESLPVKYHLQNKTDLVQDVEISVEPSDAFMFSGLKQIRLRILPGTEQEMLYNFYPLMAGYQQLPSLNINLLRFPNFTNQLLRRFIPTSIFVKPQGRLMDDTSIAAA

SEQ ID NO: 2639 - protein, 180 aa, Homo sapiens
MAGTARHDREMAIQAKKKLTTATDPIERLRLQCLARGSAGIKGLGRVFRIMDDDNNRTLDFKEFMKGLNDYAVVMEKEEVEELFRRFDKDGNGTIDFNEFLLTLRPPMSRARKEVIMQAFRKLDKTGDGVITIEDLREVYNAKHHPKYQNGEWSEEQVFRKFLDNFDSPYDKDGLVSKRA

SEQ ID NO: 2640 - protein, 321 aa, Homo sapiens
MTTIPRKGSSHLPGSLHTCKLKLQEDRRQQEKSVIAQPIFVFEKGEQTFKRPAEDTLYEAAEPECNGFPTKRVRSSSFTFHITDSQSQGVRKNNVFMTSALVQSSVDIKSAEQGPVKHSKHVIRPAILQLPQARSCAKVRKTFGHKALESCKTKEKTNNKISEGNSYLLSENLSRARISVQLSTNQDFLGATSVGCQPNEDKCSFKSCSSNFVFGENMVERVLGTQKLTQPQLENDSYAKEKPFKSIPKFPVNFLSSRTDSIKNTSLIESAAAFSSQPSRKCLLEKIDVITGEETEHNVLKVCISCFTLSGSIYILGIKLT

SEQ ID NO: 2641 - protein, 1326 aa, Homo sapiens
MTTIHSRQMLQEHVSMEFSSSTTHVQTFSQTTKIVGEEVVRRKSSSIVEFFSLVTRSSNIPAGDSVPEFVEKPQPVTAPEGDKAVFRARVQGNAKPHISWKRESGIPIKESAKIFYDSINKEHVLKLEPLTSDDSDNYKCIASNDHADAIYTVSLLVTEGQEKMDFKKMLKKRAPPAPKKKQKKVANEKEMLEILSKVPKKDFEKVCMEYGFTDFRGLLRKLKEMKKKVEVEAIRILKPLEDKETKVDTTVVFDCIMELKDPNVKMIWIKGTEPLRIQYSLGKYDVKQMGTKYMLVISNVNMNDAGIYSLSVGDKRMSAELTVLDEPLKFLGEMKPVKVTERQTAVFEIRLSKKEPNFVWKFNGKELKRDDKYEITVSEDGLTHTLKIKDARLSDSGEFSAEAGNLVQKAQLTVDRIPIKFVSNLKNVRVKERSRACLECELTSKDVTLRWKKDGQLLMHGTKYSMNHEGKRAELIIEDAQLSDGGEYTVVAMQDGDPTEYYSTAIVTVEERLATVKSGMSDVHAATGSPAELCVVLNDEKVEGVWLKDGKEITDLPGMQIVKQGAVHKLIFPSMGPEHEGKYTFRAKGTESEASVFIADPPTIDPSVLEALAAHAITVKVGHTAHIKVPFRGKPLPKVTWYKDGMEVTEEERVSMERGEDQALLTISNCVREDSGLILLKLKNDHGSATATLHLSVLDRPKPPQGRVEFLELSGSCVHMKWKAPKDNGGRPVTQFIVERRAVGKKSWIKIGEVDGKVTNFSTNKVEEGKAYQFRILAVNSEGVSDPLETEEVFAGNPIEPPGFASQPQVTDVTKEAVTITWNAPTQDGGAPVLGYIVERRKKGSNLWVPVNKDPIQGTKCTVDGLLEDTEYEFRVIAVNKAGPGQPSVPSSSVVAKDPVKPPGLVQDLHVSDSSNSSISLAWREPAEGDPPSGYILEMRAEDTKEWSKCTKIPISGTCYTVGGLIERQKYFFRIRAVNEAGVGEPVELDKGVRAMPPPAAPKFDLSARLKSHMVVRAGTALCIHAAFSGSPPPDVIWQKDGVPTKGRETITKSKNHSQFLINSTKRSDSGVYRILLQNEFGEARYDIHVRVADFPRPPTNLRLFEEVPNTVTLTWNHSPDVQEDGEAHYIIMKRDASTATWYTAAERVFSNKYTVTGLLPGRKYYFRVVARNEIGDSEPLDSRDTWLINKDQIQDLSAKLKPYEKKDWRHAPRFVTPLKPHTVLRGQDCTMTCAFLGNPRPTVTLYKGDVNITANSKFWYNSTSGVCTLVIPTCTLKDSGDYSVLVENELGKDRSSCTLTVYDKDDKSVVASITESLQKKSKHLM

SEQ ID NO: 2642 - protein, 3062 aa, Homo sapiens
MRSRLPPALAALGAALLLSSIEAEVDPPSDLNFKIIDENTVHMSWAKPVDPIVGYRITVDPTTDGPTKEFTLSASTTETLLSELVPETEYVVTITSYDEVEESVPVIGQLTIQTGSSTKPVEKKPGKTEIQKCSVSAWTDLVFLVDGSWSVGRNNFKYILDFIAALVSAFDIGEEKTRVGVVQYSSDTRTEFNLNQYYQRDELLAAIKKIPYKGGNTMTGDAIDYLVKNTFTESAGARVGFPKVAIIITDGKSQDEVEIPARELRNVGVEVFSLGIKAADAKELKQIASTPSLNHVFNVANFDAIVDIQNEIISQVCSGVDEQLGELVSGEEVVEPPSNLIAMEVSSKYVKLNWNPSPSPVTGYKVILTPMTAGSRQHALSVGPQTTTLSVRDLSADTEYQISVSAMKGMTSSEPISIMEKTQPMKVQVECSRGVDIKADIVFLVDGSYSIGIANFVKVRAFLEVLVKSFEISPNRVQISLVQYSRDPHTEFTLKKFTKVEDIIEAINTFPYRGGSTNTGKAMTYVREKIFVPSKGSRSNVPKVMILITDGKSSDAFRDPAIKLRNSDVEIFAVGVKDAVRSELEAIASPPAETHVFTVEDFDAFQRISFELTQSICLRIEQELAAIKKKAYVPPKDLSFSEVTSYGFKTNWSPAGENVFSYHITYKEAAGDDEVTVVEPASSTSVVLSSLKPETLYLVNVTAEYEDGFSIPLAGEETTEEVKGAPRNLKVTDETTDSFKITWTQAPGRVLRYRIIYRPVAGGESREVTTPPNQRRRTLENLIPDTKYEVSVIPEYFSGPGTPLTGNAATEEVRGNPRDLRVSDPTTSTMKLSWSGAPGKVKQYLVTYTPVAGGETQEVTVRGDTTNTVLQGLKEGTQYALSVTALYASGAGDALFGEGTTLEERGSPQDLVTKDITDTSIGAYWTSAPGMVRGYRVSWKSLYDDVDTGEKNLPEDAIHTMIENLQPETKYRISVFATYSSGEGEPLTGDATTELSQDSKTLKVDEETENTMRVTWKPAPGKVVNYRVVYRPHGRGKQMVAKVPPTVTSTVLKRLQPQTTYDITVLPIYKMGEGKLRQGSGTTASRFKSPRNLKTSDPTMSSFRVTWEPAPGEVKGYKVTFHPTGDDRRLGELVVGPYDNTVVLEELRAGTTYKVNVFGMFDGGESSPLVGQEMTTLSDTTVMPILSSGMECLTRAEADIVLLVDGSWSIGRANFRTVRSFISRIVEVFDIGPKRVQIALAQYSGDPRTEWQLNAHRDKKSLLQAVANLPYKGGNTLTGMALNFIRQQNFRTQAGMRPRARKIGVLITDGKSQDDVEAPSKKLKDEGVELFAIGIKNADEVELKMIATDPDDTHAYNVADFESLSRIVDDLTINLCNSVKGPGDLEAPSNLVISERTHRSFRVSWTPPSDSVDRYKVEYYPVSGGKRQEFYVSRMETSTVLKDLKPETEYVVNVYSVVEDEYSEPLKGTEKTLPVPVVSLNIYDVGPTTMHVQWQPVGGATGYILSYKPVKDTEPTRPKEVRLGPTVNDMQLTDLVPNTEYAVTVQAVLHDLTSEPVTVREVTLPLPRPQDLKLRDVTHSTMNVFWEPVPGKVRKYIVRYKTPEEDVKEVEVDRSETSTSLKDLFSQTLYTVSVSAVHDEGESPPVTAQETTRPVPAPTNLKITEVTSEGFRGTWDHGASDVSLYRITWAPFGSSDKMETILNGDENTLVFENLNPNTIYEVSITAIYPDESESDDLIGSERTLPILTTQAPKSGPRNLQVYNATSNSLTVKWDPASGRVQKYRITYQPSTGEGNEQTTTIGGRQNSVVLQKLKPDTPYTITVSSLYPDGEGGRMTGRGKTKPLNTVRNLRVYDPSTSTLNVRWDHAEGNPRQYKLFYAPAAGGPEELVPIPGNTNYAILRNLQPDTSYTVTVVPVYTEGDGGRTSDTGRTLMRGLARNVQVYNPTPNSLDVRWDPAPGPVLQYRVVYSPVDGTRPSESIVVPGNTRMVHLERLIPDTLYSVNLVALYSDGEGNPSPAQGRTLPRSGPRNLRVFGETTNSLSVAWDHADGPVQQYRIIYSPTVGDPIDEYTTVPGRRNNVILQPLQPDTPYKITVIAVYEDGDGGHLTGNGRTVGLLPPQNIHISDEWYTRFRVSWDPSPSPVLGYKIVYKPVGSNEPMEAFVGEMTSYTLHNLNPSTTYDVNVYAQYDSGLSVPLTDQGTTLYLNVTDLKTYQIGWDTFCVKWSPHRAATSYRLKLSPADGTRGQEITVRGSETSHCFTGLSPDTDYGVTVFVQTPNLEGPGVSVKEHTTVKPTEAPTEPPTPPPPPTIPPARDVCKGAKADIVFLTDASWSIGDDNFNKVVKFIFNTVGGFDEISPAGIQVSFVQYSDEVKSEFKLNTYNDKALALGALQNIRYRGGNTRTGKALTFIKEKVLTWESGMRKNVPKVLVVVTDGRSQDEVKKAALVIQQSGFSVFVVGVADVDYNELANIASKPSERHVFIVDDFESFEKIEDNLITFVCETATSSCPLIYLDGYTSPGFKMLEAYNLTEKNFASVQGVSLESGSFPSYSAYRIQKNAFVNQPTADLHPNGLPPSYTIILLFRLLPETPSDPFAIWQITDRDYKPQVGVIADPSSKTLSFFNKDTRGEVQTVTFDTEEVKTLFYGSFHKVHIVVTSKSVKIYIDCYEIIEKDIKEAGNITTDGYEILGKLLKGERKSAAFQIQSFDIVCSPVWTSRDRCCDIPSRRDEGKCPAFPNSCTCTQDSVGPPGPPGPAGGPGAKGPRGERGISGAIGPPGPRGDIGPPGPQGPPGPQGPNGLSIPGEQGRQGMKGDAGEPGLPGRTGTPGLPGPPGPMGPPGDRGFTGKDGAMGPRGPPGPGSPGVTGPSGKPGKPGDHGRPGPSGLKGEKGDRGDIASQNMMRAVARQVCEQLISGQMNRFNQMLNQIPNDYQSSRNQPGPPGPPGPPGSAGARGEPGPGGRPGFPGTPGMQGPPGERGLPGEKGERGTGSSGPRGLPGPPGPQGESRTGPPGSTGSRGPPGPPGRPGNSGIRGPPGPPGYCDSSQCASIPYNGQGYPGTLLPL

SEQ ID NO: 2643 - protein, 1528 aa, Homo sapiens
MWPSQLLIFMMLLAPIIHGGKHSERHPALAAPLRHAERSPGGALPPRHLLQQPAAERTAAHRGQGPRGATRGVRGPGAQGAQIAAQAFSRAPIPMAVVRRELSCESYPIELRCPGTDVIMIESANYGRTDDKICDSDPAQMENIRCYLPDAYKIMSQRCNNRTQCAVVAGPDVFPDPCPGTYKYLEVQYECVPYKVEQKVFLCPGLLKGVYQSEHLFESDHQSGAWCKDPLQASDKIYYMPWTPYRTDTLTEYSSKDDFIAGRPTTTYKLPHRVDGTGFVVYDGALFFNKERTRNIVKFDLRTRIKSGEAIIANANYHDTSPYRWGGKSDIDLAVDENGLWVIYATEQNNGKIVISQLNPYTLRIEGTWDTAYDKRSASNAFMICGILYVVKSVYEDDDNEATGNKIDYIYNTDQSKDSLVDVPFPNSYQYIAAVDYNPRDNLLYVWNNYHVVKYSLDFGPLDSRSGQAHHGQVSYISPPIHLDSELERPSVKDISTTGPLGMGSTTTSTTLRTTTLSPGRSTTPSVSGRRNRSTSTPSPAVEVLDDMTTHLPSASSQIPALEESCEAVEAREIMWFKTRQGQIAKQPCPAGTIGVSTYLCLAPDGIWDPQGPDLSNCSSPWVNHITQKLKSGETAANIARELAEQTRNHLNAGDITYSVRAMDQLVGLLDVQLRNLTPGGKDSAARSLNKLQKRERSCRAYVQAMVETVNNLLQPQALNAWRDLTTSDQLRAATMLLHTVEESAFVLADNLLKTDIVRENTDNIKLEVARLSTEGNLEDLKFPENMGHGSTIQLSANTLKQNGRNGEIRVAFVLYNNLGPYLSTENASMKLGTEALSTNHSVIVNSPVITAAINKEFSNKVYLADPVVFTVKHIKQSEENFNPNCSFWSYSKRTMTGYWSTQGCRLLTTNKTHTTCSCNHLTNFAVLMAHVEVKHSDAVHDLLLDVITWVGILLSLVCLLICIFTFCFFRGLQSDRNTIHKNLCISLFVAELLFLIGINRTDQPIACAVFAALLHFFFLAAFTWMFLEGVQLYIMLVEVFESEHSRRKYFYLVGYGMPALIVAVSAAVDYRSYGTDKVCWLRLDTYFIWSFIGPATLIIMLNVIFLGIALYKMFHHTAILKPESGCLDNIKSWVIGAIALLCLLGLTWAFGLMYINESTVIMAYLFTIFNSLQGMFIFIFHCVLQKKVRKEYGKCLRTHCCSGKSTESSIGSGKTSGSRTPGRYSTGSQSRIRRMWNDTVRKQSESSFITGDINSSASLNREGLLNNARDTSVMDTLPLNGNHGNSYSIASGEYLSNCVQIIDRGYNHNETALEKKILKELTSNYIPSYLNNHERSSEQNRNLMNKLVNNLGSGREDDAIVLDDATSFNHEESLGLELIHEESDAPLLPPRVYSTENHQPHHYTRRRIPQDHSESFFPLLTNEHTEDLQSPHRDSLYTSMPTLAGVAATESVTTSTQTEPPPAKCGDAEDVYYKSMPNLGSRNHVHQLHTYYQLGRGSSDGFIVPPNKDGTPPEGSSKGPAHLVTSL

SEQ ID NO: 2644 - protein, 159 aa, Homo sapiens
MFPPSGHQDVSERRLDTQRPQVTMWERDVSSDRQEPGRRGRSWGLEGSQALSQQAEVIVRQLQELRRLEEEVRLLRETSLQQKMRLEAQAMELEALARAEKAGRAEAEGLRAALAGAEVVRKNLEEGSQRELEEVQRLHQEQLSSLTQAHEEALSSLTS

SEQ ID NO: 2645 - protein, 1177 aa, Homo sapiens
MRSKARARKLAKSDGDVVNNMYEPNRDLLASHSAEDEAEDSAMSPIPVGPPSPFPTSEDFTPKEGSPYEAPVYIPEDIPIPADFELRESSIPGAGLGVWAKRKMEAGERLGPCVVVPRAAAKETDFGWEQILTDVEVSPQEGCITKQISEDLGSEKFCVDANQAGAGSWLKYIRVACSCDDQNLTMCQISEQIYYKVIKDIEPGEELLVHVKEGVYPLGTVPPGLDEEPTFRCDECDELFQSKLDLRRHKKYTCGSVGAALYEGLAEELKPEGLGGGSGQAHECKDCERMFPNKYSLEQHMVIHTEEREYKCDQCPKAFNWKSNLIRHQMSHDSGKRFECENCVKVFTDPSNLQRHIRSQHVGARAHACPDCGKTFATSSGLKQHKHIHSTVKPFICEVCHKSYTQFSNLCRHKRMHADCRTQIKCKDCGQMFSTTSSLNKHRRFCEGKNHYTPGGIFAPGLPLTPSPMMDKAKPSPSLNHASLGFNEYFPSRPHPGSLPFSTAPPTFPALTPGFPGIFPPSLYPRPPLLPPTSLLKSPLNHTQDAKLPSPLGNPALPLVSAVSNSSQGTTAAAGPEEKFESRLEDSCVEKLKTRSSDMSDGSDFEDVNTTTGTDLDTTTGTGSDLDSDVDSDPDKDKGKGKSAEGQPKFGGGLAPPGAPNSVAEVPVFYSQHSFFPPPDEQLLTATGAAGDSIKAIASIAEKYFGPGFMGMQEKKLGSLPYHSAFPFQFLPNFPHSLYPFTDRALAHNLLVKAEPKSPRDALKVGGPSAECPFDLTTKPKDVKPILPMPKGPSAPASGEEQPLDLSIGSRARASQNGGGREPRKNHVYGERKLGAGEGLPQVCPARMPQQPPLHYAKPSPFFMDPIYRVEKRKVTDPVGALKEKYLRPSPLLFHPQMSAIETMTEKLESFAAMKADSGSSLQPLPHHPFNFRSPPPTLSDPILRKGKERYTCRYCGKIFPRSANLTRHLRTHTGEQPYRCKYCDRSFSISSNLQRHVRNIHNKEKPFKCHLCNRCFGQQTNLDRHLKKHEHENAPVSQHPGVLTNHLGTSASSPTSESDNHALLDEKEDSYFSEIRNFIANSEMNQASTRTEKRADMQIVDGSAQCPGLASEKQEDVEEEDDDDLEEDDEDSLAGKSQDDTVSPAPEPQAAYEDEEDEEPAASLAVGFDHTRRHMQ

SEQ ID NO: 2646 - protein, 734 aa, Homo sapiens
MAECGASGSGSSGDSLDKSITLPPDEIFRNLENAKRFAIDIGGSLTKLAYYSTVQHKVAKVRSFDHSGKDTEREHEPPYEISVQEEITARLHFIKFENTYIEACLDFIKDHLVNTETKVIQATGGGAFVYQKDSDPEFRFQTNHPHIFPYLLVNIGSGVSIVKVETEDRFEWVGGSSIGGGTFWGLGALLTKTKKFDELLHLASRGQHSNVDMLVRDVYGGAHQTLGLSGNLIASSFGKSATADQEFSKEDMAKSLLHMISNDIGQLACLHARLHSLDRVYFGGFFIRGHPVTMRTITYSINFFSKGEVQALFLRHEGYLGAIGAFLKGAEQDNPNQYSWGENYAGSSGLMSASPELGPAQRARSGTFDLLEMDRLERPLVDLPLLLDPPSYVPDTVDLTDDALARKYWLTCFEEALDGVVKRAVASQPDSVDAAERAEKFRQKYWNKLQTLRQQPFAYGTLTVRSLLDTREHCLNEFNFPDPYSKVKQRENGVALRCFPGVVRSLDALGWEERQLALVKGLLAGNVFDWGAKAVSAVLESDPYFGFEEAKRKLQERPWLVDSYSEWLQRLKGPPHKCALIFADNSGIDIILGVFPFVRELLLRGTEVILACNSGPALNDVTHSESLIVAERIAGMDPVVHSALQEERLLLVQTGSSSPCLDLSRLDKGLAALVRERGADLVVIEGMGRAVHTNYHAALRCESLKLAVIKNAWLAERLGGRLFSVIFKYEVPAE

SEQ ID NO: 2647 - protein, 770 aa, Homo sapiens
MVNCHLKIGNTKDIIMIYEEDAEEWALYLTEVFLHVVKREAILLYRLENFSFRHLELLNLTSYKCKLLILSNSLLRDLTPKKCQFLEKILHSPKSVVTLLCGVKSSDQLYELLNISQSRWEISTEQEPEDYISVIQSIIFKDSEDYFEVNIPTDLRAKHSGEISERKEIEELSEASRNTIPLAVVLPTEIPCENPGEIFIILRDEVIGDTVEVEFTSSNKRIRTRPALWNKKVWCMKALEFPAGSVHVNVYCDGIVKATTKIKYYPTAKAKECLFRMADSGESLCQNSIEELDGVLTSIFKHEIPYYEFQSLQTEICSQNKYTHFKELPTLLHCAAKFGLKNLAIHLLQCSGATWASKMKNMEGSDPAHIAERHGHKELKKIFEDFSIQEIDINNEQENDYEEDIASFSTYIPSTQNPAFHHESRKTYGQSADGAEANEMEGEGKQNGSGMETKHSPLEVGSESSEDQYDDLYVFIPGADPENNSQEPLMSSRPPLPPPRPVANAFQLERPHFTLPGTMVEGQMERSQNWGHPGVRQETGDEPKGEKEKKEEEKEQEEEEDPYTFAEIDDSEYDMILANLSIKKKTGSRSFIINRPPAPTPRPTSIPPKEETTPYIAQVFQQKTARRQSDDDKFCGLPKKQDRARIESPAFSTLRGCLTDGQEELILLQEKVKNGKMSMDEALEKFKHWQMGKSGLEMIQQEKLRQLRDCIIGKRPEEENVYNKLTIVHHPGGKETAHNENKFYNVHFSNKLPARPQVEKEFGFCCKKDH

SEQ ID NO: 2648 - protein, 1342 aa, Homo sapiens
MWPSQLLIFMMLLAPIIHGGKHSERHPALAAPLRHAERSPGGALPPRHLLQQPAAERTAAHRGQGPRGATRGVRGPGAQGAQIAAQAFSRAPIPMAVVRRELSCESYPIELRCPGTDVIMIESANYGRTDDKICDSDPAQMENIRCYLPDAYKIMSQRCNNRTQCAVVAGPDVFPDPCPGTYKYLEVQYECVPYKVEQKVFLCPGLLKGVYQSEHLFESDHQSGAWCKDPLQASDKIYYMPWTPYRTDTLTEYSSKDDFIAGRPTTTYKLPHRVDGTGFVVYDGALFFNKERTRNIVKFDLRTRIKSGEAIIANANYHDTSPYRWGGKSDIDLAVDENGLWVIYATEQNNGKIVISQLNPYTLRIEGTWDTAYDKRSASNAFMICGILYVVKSVYEDDDNEATGNKIDYIYNTDQSKDSLVDVPFPNSYQYIAAVDYNPRDNLLYVWNNYHVVKYSLDFGPLDSRSGQAHHGQVSYISPPIHLDSELERPSVKDISTTGPLGMGSTTTSTTLRTTTLSPGRSTTPSVSGRRNRSTSTPSPAVEVLDDMTTHLPSASSQIPALEESCEAVEAREIMWFKTRQGQIAKQPCPAGTIGVSTYLCLAPDGIWDPQGPDLSNCSSPWVNHITQKLKSGETAANIARELAEQTRNHLNAGDITYSVRAMDQLVGLLDVQLRNLTPGGKDSAARSLNKLQKRERSCRAYVQAMVETVNNLLQPQALNAWRDLTTSDQLRAATMLLHTVEESAFVLADNLLKTDIVRENTDNIKLEVARLSTEGNLEDLKFPENMGHGSTIQLSANTLKQNGRNGEIRVAFVLYNNLGPYLSTENASMKLGTEALSTNHSVIVNSPVITAAINKEFSNKVYLADPVVFTVKHIKQSEENFNPNCSFWSYSKRTMTGYWSTQGCRLLTTNKTHTTCSCNHLTNFAVLMAHVEVKHSDAVHDLLLDVITWVGILLSLVCLLICIFTFCFFRGLQSDRNTIHKNLCISLFVAELLFLIGINRTDQPIACAVFAALLHFFFLAAFTWMFLEGVQLYIMLVEVFESEHSRRKYFYLVGYGMPALIVAVSAAVDYRSYGTDKVCWLRLDTYFIWSFIGPATLIIMLNVIFLGIALYKMFHHTAILKPESGCLDNIKSWVIGAIALLCLLGLTWAFGLMYINESTVIMAYLFTIFNSLQGMFIFIFHCVLQKKVRKEYGKCLRTHCCSGKSTESSIGSGKTSGSRTPGRYSTGSQSRIRRMWNDTVRKQSESSFITGDINSSASLNRGAMANHLISNALLRPHGTNNPYNTLLGEPAVCNNPSVSMYNAQEPYRETSMGVKLNIAYQIGASEQCQGYKCHGYSTTEW

SEQ ID NO: 2649 - protein, 988 aa, Homo sapiens
METKGYHSLPEGLDMERRWGQVSQAVERSSLGPTERTDENNYMEIVNVSCVSGAIPNNSTQGSSKEKQELLPCLQQDNNRPGILTSDIKTELESKELSATVAESMGLYMDSVRDADYSYEQQNQQGSMSPAKIYQNVEQLVKFYKGNGHRPSTLSCVNTPLRSFMSDSGSSVNGGVMRAVVKSPIMCHEKSPSVCSPLNMTSSVCSPAGINSVSSTTASFGSFPVHSPITQGTPLTCSPNVENRGSRSHSPAHASNVGSPLSSPLSSMKSSISSPPSHCSVKSPVSSPNNVTLRSSVSSPANINNSRCSVSSPSNTNNRSTLSSPAASTVGSICSPVNNAFSYTASGTSAGSSTLRDVVPSPDTQEKGAQEVPFPKTEEVESAISNGVTGQLNIVQYIKPEPDGAFSSSCLGGNSKINSDSSFSVPIKQESTKHSCSGTSFKGNPTVNPFPFMDGSYFSFMDDKDYYSLSGILGPPVPGFDGNCEGSGFPVGIKQEPDDGSYYPEASIPSSAIVGVNSGGQSFHYRIGAQGTISLSRSARDQSFQHLSSFPPVNTLVESWKSHGDLSSRRSDGYPVLEYIPENVSSSTLRSVSTGSSRPSKICLVCGDEASGCHYGVVTCGSCKVFFKRAVEGKCSWQHNYLCAGRNDCIIDKIRRKNCPACRLQKCLQAGMNLGARKSKKLGKLKGIHEEQPQQQQPPPPPPPPQSPEEGTTYIAPAKEPSVNTALVPQLSTISRALTPSPVMVLENIEPEIVYAGYDSSKPDTAENLLSTLNRLAGKQMIQVVKWAKVLPGFKNLPLEDQITLIQYSWMCLSSFALSWRSYKHTNSQFLYFAPDLVFNEEKMHQSAMYELCQGMHQISLQFVRLQLTFEEYTIMKVLLLLSTIPKDGLKSQAAFEEMRTNYIKELRKMVTKCPNNSGQSWQRFYQLTKLLDSMHDLVSDLLEFCFYTFRESHALKVEFPAMLVEIISDQLPKVESGNAKPLYFHRK

SEQ ID NO: 2650 - protein, 129 aa, Homo sapiens
MLQCLVTGHPRPQVRWTKTAGSASDKFQETSVFNETLRIERIARTQGGRYYCKAENGVGVPAIKSIRVDVQYLDEPMLTVHQTVSDVRGNFYQEKTVFLRCTVNSNPPARFIWKRGSDTLSHSQDNGVD

SEQ ID NO: 2651 - protein, 2851 aa, Homo sapiens
MASEDNRVPSPPPTGDDGGGGGREETPTEGGALSLKPGLPIRGIRMKFAVLTGLVEVGEVSNRDIVETVFNLLVGGQFDLEMNFIIQEGESINCMVDLLEKCDITCQAEVWSMFTAILKKSIRNLQVCTEVGLVEKVLGKIEKVDNMIADLLVDMLGVLASYNLTVRELKLFFSKLQGDKGRWPPHAGKLLSVLKHMPQKYGPDAFFNFPGKSAAAIALPPIAKWPYQNGFTFHTWLRMDPVNNINVDKDKPYLYCFRTSKGLGYSAHFVGGCLIVTSIKSKGKGFQHCVKFDFKPQKWYMVTIVHIYNRWKNSELRCYVNGELASYGEITWFVNTSDTFDKCFLGSSETADANRVFCGQMTAVYLFSEALNAAQIFAIYQLGLGYKGTFKFKAESDLFLAEHHKLLLYDGKLSSAIAFTYNPRATDAQLCLESSPKDNPSIFVHSPHALMLQDVKAVLTHSIQSAMHSIGGVQVLFPLFAQLDYRQYLSDEIDLTICSTLLAFIMELLKNSIAMQEQMLACKGFLVIGYSLEKSSKSHVSRAVLELCLAFSKYLSNLQNGMPLLKQLCDHVLLNPAIWIHTPAKVQLMLYTYLSTEFIGTVNIYNTIRRVGTVLLIMHTLKYYYWAVNPQDRSGITPKGLDGPRPNQKEMLSLRAFLLMFIKQLVMKDSGVKEDELQAILNYLLTMHEDDNLMDVLQLLVALMSEHPNSMIPAFDQRNGLRVIYKLLASKSEGIRVQALKAMGYFLKHLAPKRKAEVMLGHGLFSLLAERLMLQTNLITMTTYNVLFEILIEQIGTQVIHKQHPDPDSSVKIQNPQILKVIATLLRNSPQCPESMEVRRAFLSDMIKLFNNSRENRRSLLQCSVWQEWMLSLCYFNPKNSDEQKITEMVYAIFRILLYHAVKYEWGGWRVWVDTLSITHSKVTFEIHKENLANIFREQQGKVDEEIGLCSSTSVQAASGIRRDINVSVGSQQPDTKDSPVCPHFTTNGNENSSIEKTSSLESASNIELQTTNTSYEEMKAEQENQELPDEGTLEETLTNETRNADDLEVSSDIIEAVAISSNSFITTGKDSMTVSEVTASISSPSEEDASEMPEFLDKSIVEEEEDDDYVELKVEGSPTEEANLPTELQDNSLSPAASEAGEKLDMFGNDDKLIFQEGKPVTEKQTDTETQDSKDSGIQTMTASGSSAMSPETTVSQIAVESDLGQMLEEGKKATNLTRETKLINDCHGSVSEASSEQKIAKLDVSNVATDTERLELKASPNVEAPQPHRHVLEISRQHEQPGQGIAPDAVNGQRRDSRSTVFRIPEFNWSQMHQRLLTDLLFSIETDIQMWRSHSTKTVMDFVNSSDNVIFVHNTIHLISQVMDNMVMACGGILPLLSAATSATHELENIEPTQGLSIEASVTFLQRLISLVDVLIFASSLGFTEIEAEKSMSSGGILRQCLRLVCAVAVRNCLECQQHSQLKTRGDKALKPMHSLIPLGKSAAKSPVDIVTGGISPVRDLDRLLQDMDINRLRAVVFRDIEDSKQAQFLALAVVYFISVLMVSKYRDILEPQNERHSQSCTETGSENENVSLSEITPAAFSTLTTASVEESESTSSARRRDSGIGEETATGLGSHVEVTPHTAPPGVSAGPDAISEVLSTLSLEVNKSPETKNDRGNDLDTKATPSVSVSKNVNVKDILRSLVNIPADGVTVDPALLPPACLGALGDLSVEQPVQFRSFDRSVIVAAKKSAVSPSTFNTSIPTNAVSVVSSVDSAQASDMGGESPGSRSSNAKLPSVPTVDSVSQDPVSNMSITERLEHALEKAAPLLREIFVDFAPFLSRTLLGSHGQELLIEGTSLVCMKSSSSVVELVMLLCSQEWQNSIQKNAGLAFIELVNEGRLLSQTMKDHLVRVANEAEFILSRQRAEDIHRHAEFESLCAQYSADKREDEKMCDHLIRAAKYRDHVTATQLIQKIINILTDKHGAWGNSAVSRPLEFWRLDYWEDDLRRRRRFVRNPLGSTHPEATLKTAVEHATDEDILAKGKQSIRSQALGNQNSENEILLEGDDDTLSSVDEKDLENLAGPVSLSTPAQLVAPSVVVKGTLSVTSSELYFEVDEEDPNFKKIDPKILAYTEGLHGKWLFTEIRSIFSRRYLLQNTALEIFMANRVAVMFNFPDPATVKKVVNYLPRVGVGTSFGLPQTRRISLASPRQLFKASNMTQRWQHREISNFEYLMFLNTIAGRSYNDLNQYPVFPWVITNYESEELDLTLPTNFRDLSKPIGALNPKRAAFFAERYESWEDDQVPKFHYGTHYSTASFVLAWLLRIEPFTTYFLNLQGGKFDHADRTFSSISRAWRNSQRDTSDIKELIPEFYYLPEMFVNFNNYNLGVMDDGTVVSDVELPPWAKTSEEFVHINRLALESEFVSCQLHQWIDLIFGYKQQGPEAVRALNVFYYLTYEGAVNLNSITDPVLREAVEAQIRSFGQTPSQLLIEPHPPRGSAMQVSPLMFTDKAQQDVIMVLKFPSNSPVTHVAANTQPGLATPAVITVTANRLFAVNKWHNLPAHQGAVQDQPYQLPVEIDPLIASNTGMHRRQITDLLDQSIQVHSQCFVITSDNRYILVCGFWDKSFRVYSTDTGRLIQVVFGHWDVVTCLARSESYIGGNCYILSGSRDATLLLWYWNGKCSGIGDNPGETAAPRAILTGHDYEVTCAAVCAELGLVLSGSQEGPCLIHSMNGDLLRTLEGPENCLKPKLIQASREGHCVIFYENGLFCTFSVNGKLQATMETDDNIRAIQLSRDGQYLLTGGDRGVVVVRQVSDLKQLFAYPGCDAGIRAMALSYDQRCIISGMASGSIVLFYNDFNRWHHEYQTRY

SEQ ID NO: 2652 - protein, 697 aa, Homo sapiens
MACEIMPLQSSQEDERPLSPFYLSAHVPQVSNVSATGELLERTIRSAVEQHLFDVNNSGGQSSEDSESGTLSASSATSARQRRRQSKEQDEVRHGRDKGLINKENTPSGFNHLDDCILNTQEVEKVHKNTFGCAGERSKPKRQKSSTKLSELHDNQDGLVNMESLNSTRSHERTGPDDFEWMSDERKGNEKDGGHTQHFESPTMKIQEHPSLSDTKQQRNQDAGDQEESFVSEVPQSDLTALCDEKNWEEPIPAFSSWQRENSDSDEAHLSPQAGRLIRQLLDEDSDPMLSPRFYAYGQSRQYLDDTEVPPSPPNSHSFMRRRSSSLGSYDDEQEDLTPAQLTRRIQSLKKKIRKFEDRFEEEKKYRPSHSDKAANPEVLKWTNDLAKFRRQLKESKLKISEEDLTPRMRQRSNTLPKSFGSQLEKEDEKKQELVDKAIKPSVEATLESIQRKLQEKRAESSRPEDIKDMTKDQIANEKVALQKALLYYESIHGRPVTKNERQVMKPLYDRYRLVKQILSRANTIPIIGSPSSKRRSPLLQPIIEGETASFFKEIKEEEEGSEDDSNVKPDFMVTLKTDFSARCFLDQFEDDADGFISPMDDKIPSKCSQDTGLSNLHAASIPELLEHLQEMREEKKRIRKKLRDFEDNFFRQNGRNVQKEDRTPMAEEYSEYKHIKAKLRLLEVLISKRDTDSKSM

SEQ ID NO: 2653 - protein, 86 aa, Homo sapiens
MEADIITNLRCRLKEAEEERLKAAQYGLQLVESQNELQNQLDKCRNEMMTMTESYEQEKYTLQREVELKSRMLESLSCECEAIKQQ

SEQ ID NO: 2654 - protein, 706 aa, Homo sapiens
MGKGSISFLFFSQIGSLENHYLFKHKNHPRRSRRSAFHITKRLSDDDRVIWAEQQYEKERSKRSALRDSALNLFNDPMWNQQWYLQDTRMTAALPKLDLHVIPVWQKGITGKGVVITVLDDGLEWNHTDIYANYDPEASYDFNDNDHDPFPRYDPTNENKHGTRCAGEIAMQANNHKCGVGVAYNSKVGGIRMLDGIVTDAIEASSIGFNPGHVDIYSASWGPNDDGKTVEGPGRLAQKAFEYGVKQGRQGKGSIFVWASGNGGRQGDNCDCDGYTDSIYTISISSASQQGLSPWYAEKCSSTLATSYSSGDYTDQRITSADLHNDCTETHTGTSASAPLAAGIFALALEANPNLTWRDMQHLVVWTSEYDPLANNPGWKKNGAGLMVNSRFGFGLLNAKALVDLADPRTWRSVPEKKECVVKDNDFEPRALKANGEVIIEIPTRACEGQENAIKSLEHVQFEATIEYSRRGDLHVTLTSAAGTSTVLLAERERDTSPNGFKNWDFMSVHTWGENPIGTWTLRITDMSGRIQNEGRIVNWKLILHGTSSQPEHMKQPRVYTSYNTVQNDRRGVEKMVDPGEEQPTQENPKENTLVSKSPSSSSVGGRRDELEEGAPSQAMLRLLQSAFSKNSPPKQSPKKSPSAKLNIPYENFYEALEKLNKPSQLKDSEDSLYNDYVDVFYNTKPYKHRDDRLLQALVDILNEEN

SEQ ID NO: 2655 - protein, 1512 aa, Homo sapiens
MWPSQLLIFMMLLAPIIHAFSRAPIPMAVVRRELSCESYPIELRCPGTDVIMIESANYGRTDDKICDSDPAQMENIRCYLPDAYKIMSQRCNNRTQCAVVAGPDVFPDPCPGTYKYLEVQYECVPYKVEQKVFLCPGLLKGVYQSEHLFESDHQSGAWCKDPLQASDKIYYMPWTPYRTDTLTEYSSKDDFIAGRPTTTYKLPHRVDGTGFVVYDGALFFNKERTRNIVKFDLRTRIKSGEAIIANANYHDTSPYRWGGKSDIDLAVDENGLWVIYATEQNNGKIVISQLNPYTLRIEGTWDTAYDKRSASNAFMICGILYVVKSVYEDDDNEATGNKIDYIYNTDQSKDSLVDVPFPNSYQYIAAVDYNPRDNLLYVWNNYHVVKYSLDFGPLDSRSGQAHHGQVSYISPPIHLDSELERPSVKDISTTGPLGMGSTTTSTTLRTTTLSPGRSTTPSVSGRRNRSTSTPSPAVEVLDDMTTHLPSASSQIPALEESCEAVEAREIMWFKTRQGQIAKQPCPAGTIGVSTYLCLAPDGIWDPQGPDLSNCSSPWVNHITQKLKSGETAANIARELAEQTRNHLNAGDITYSVRAMDQLVGLLDVQLRNLTPGGKDSAARSLNKLQKRERSCRAYVQAMVETVNNLLQPQALNAWRDLTTSDQLRAATMLLHTVEESAFVLADNLLKTDIVRENTDNIKLEVARLSTEGNLEDLKFPENMGHGSTIQLSANTLKQNGRNGEIRVAFVLYNNLGPYLSTENASMKLGTEALSTNHSVIVNSPVITAAINKEFSNKVYLADPVVFTVKHIKQSEENFNPNCSFWSYSKRTMTGYWSTQGCRLLTTNKTHTTCSCNHLTNFAVLMAHVEVKHSDAVHDLLLDVITWVGILLSLVCLLICIFTFCFFRGLQSDRNTIHKNLCISLFVAELLFLIGINRTDQPIACAVFAALLHFFFLAAFTWMFLEGVQLYIMLVEVFESEHSRRKYFYLVGYGMPALIVAVSAAVDYRSYGTDKVCWLRLDTYFIWSFIGPATLIIMLNVIFLGIALYKMFHHTAILKPESGCLDNINYEDNRPFIKSWVIGAIALLCLLGLTWAFGLMYINESTVIMAYLFTIFNSLQGMFIFIFHCVLQKKVRKEYGKCLRTHCCSGKSTESSIGSGKTSGSRTPGRYSTGSQSRIRRMWNDTVRKQSESSFITGDINSSASLNRGAMANHLISNALLRPHGTNNPYNTLLGEPAVCNNPSVSMYNAQEGLLNNARDTSVMDTLPLNGNHGNSYSIASGEYLSNCVQIIDRGYNHNETALEKKILKELTSNYIPSYLNNHERSSEQNRNLMNKLVNNLGSGREDDAIVLDDATSFNHEESLGLELIHEESDAPLLPPRVYSTENHQPHHYTRRRIPQDHSESFFPLLTNEHTEDLQSPHRDSLYTSMPTLAGVAATESVTTSTQTEPPPAKCGDAEDVYYKSMPNLGSRNHVHQLHTYYQLGRGSSDGFIVPPNKDGTPPEGSSKGPAHLVTSL

SEQ ID NO: 2656 - protein, 129 aa, Homo sapiens
MVFLPLKWSLATMSFLLSSLLALLTVSTPSWCQSTEASPKRSDGTPFPWNKIRLPEYVIPVHYDLLIHANLTTLTFWGTTKVEITASQPTSTIILHSHHLQISRATLRKGAGERLSEEPLQVLEHPRQE

SEQ ID NO: 2657 - protein, 61 aa, Homo sapiens
MLFEGKVNPQTQSLLAECGEWTRRSLHLRVLGRQLILPTDKGVQHFQGSTPASAVHRPPLS

SEQ ID NO: 2658 - protein, 662 aa, Homo sapiens
MGRWAWVPSPWPPPGLGPFLLLLLLLLLLPRGFQPQPGGNRTESPEPNATATPAIPTILVTSVTSETPATSAPEAEGPQSGGLPPPPRAVPSSSSPQAQALTEDGRPCRFPFRYGGRMLHACTSEGSAHRKWCATTHNYDRDRAWGYCVEATPPPGGPAALDPCASGPCLNGGSCSNTQDPQSYHCSCPRAFTGKDCGTEKCFDETRYEYLEGGDRWARVRQGHVEQCECFGGRTWCEGTRHTACLSSPCLNGGTCHLIVATGTTVCACPPGFAGRLCNIEPDERCFLGNGTGYRGVASTSASGLSCLAWNSDLLYQELHVDSVGAAALLGLGPHAYCRNPDNDERPWCYVVKDSALSWEYCRLEACDLETEGRESLTRVQLSPDLLATLPEPASPGRQACGRRHKKRTFLRPRIIGGSSSLPGSHPWLAAIYIGDSFCAGSLVHTCWVVSAAHCFSHSPPRDSVSVVLGQHFFNRTTDVTQTFGIEKYIPYTLYSVFNPSDHDLVLIRLKKKGDRCATRSQFVQPICLPEPGSTFPAGHKCQIAGWGHLDENVSGYSSSLREALVPLVADHKCSSPEVYGADISPNMLCAGYFDCKSDACQGDSGGPLACEKNGVAYLYGIISWGDGCGRLHKPGVYTRVANYVDWINDRIRPPRRLVAPS

SEQ ID NO: 2659 - protein, 609 aa, Homo sapiens
MKEQDLCNKIMAKILENYNTLFEVEYTENDHLRCENLARLIIVKEVYYKNSLPILLTRGLERDMPKPPPKTKNMESLNSTRSHERTGPDDFEWMSDERKGNEKDGGHTQHFESPTMKIQEHPSLSDTKQQRNQDAGDQEESFVSEVPQSDLTALCDEKNWEEPIPAFSSWQRENSDSDEAHLSPQAGRLIRQLLDEDSDPMLSPRFYAYGQSRQYLDDTEVPPSPPNSHSFMRRRSSSLGSYDDEQEDLTPAQLTRRIQSLKKKIRKFEDRFEEEKKYRPSHSDKAANPEVLKWTNDLAKFRRQLKESKLKISEEDLTPRMRQRSNTLPKSFGSQLEKEDEKKQELVDKAIKPSVEATLESIQRKLQEKRAESSRPEDIKDMTKDQIANEKVALQKALLYYESIHGRPVTKNERQVMKPLYDRYRLVKQILSRANTIPIIGSPSSKRRSPLLQPIIEGETASFFKEIKEEEEGSEDDSNVKPDFMVTLKTDFSARCFLDQFEDDADGFISPMDDKIPSKCSQDTGLSNLHAASIPELLEHLQEMREEKKRIRKKLRDFEDNFFRQNGRNVQKEDRTPMAEEYSEYKHIKAKLRLLEVLISKRDTDSKSM

SEQ ID NO: 2660 - protein, 1292 aa, Homo sapiens
MDASYDGTEVTVVMEEIEEAYCYTSPGPPKKKKKYKIHGEKTKKPRSAYLLYYYDIYLKVQQELPHLPQSEINKKISESWRLLSVAERSYYLEKAKLEKEGLDPNSKLSALTAVVPDIPGFRKILPRSDYIIIPKSSLQEDRSCPQLELCVAQNQMSPKGPPLVSNTAPETVPSHAGMAEQCLAVEALAEEVGALTQSGAVQEIATSEILSQDVLLEDASLEVGESHQPYQTSLVIEETLVNGSPDLPTGSLAVPHPQVGESVSVVTVMRDSSESSSSAPATQFIMLPLPAYSVVENPTSIKLTTTYTRRGHGTCTSPGCSFTYVTRHKPPKCPTCGNFLGGKWIPKEKPAKVKVELASGVSSKGSVVKRNQQPVTTEQNSSKENASKLTLENSEAVSQLLNVAPPREVGEESEWEEVIISDAHVLVKEAPGNCGTAVTKTPVVKSGVQPEVTLGTTDNDSPGADVPTPSEGTSTSSPLPAPKKPTGADLLTPGSRAPELKGRARGKPSLLAAARPMRAILPAPVNVGRGSSMGLPRARQAFSLSDKTPSVRTCGLKPSTLKQLGQPIQQPSGPGEVKLPSGPSNRTSQVKVVEVKPDMFPPYKYSCTVTLDLGLATSRGRGKCKNPSCSYVYTNRHKPRICPSCGVNLAKDRTEKTTKAIEVSSPLPDVLNATEPLSTAQREIQRQSTLQLLRKVLQIPENESELAEVFALIHELNSSRLILSNVSEETVTIEQTSWSNYYESPSTQCLLCSSPLFKGGQNSLAGPQECWLLTASRLQTVTAQVKMCLNPHCLALHSFIDIYTGLFNVGNKLLVSLDLLFAIRNQIKLGEDPRVSINVVLKSVQEQTEKTLTSEELSQLQELLCNGYWAFECLTVRDYNDMICGICGVAPKVEMAQRSEENVLALKSVEFTWPEFLGSNEVNVEDFWATMETEVIEQVAFPASIPITKFDASVIAPFFPPLMRGAVVVNTEKDKNLDVQPVPGSGSALVRLLQEGTCKLDEIGSYSEEKLQHLLRQCGIPFGAEDSKDQLCFSLLALYESVQNGARAIRPPRHFTGGKIYKVCPHQVVCGSKYLVRGESARDHVDLLASSRHWPPVYVVDMATSVALCADLCYPELTNQMWGRNQGCFSSPTEPPVSVSCPELLDQHYTVDMTETEHSIQHPVTKTATRRIVHAGLQPNPGDPSAGHHSLALCPELAPYATILASIVDSKPNGVRQRPIAFDNATHYYLYNRLMDFLTSREIVNRQIHDIVQSCQPGEVVIRDTLYRLGVAQIKTETEEEGEEEEVAAVAE

SEQ ID NO: 2661 - protein, 126 aa, Homo sapiens
MFPPSGHQDVSERRLDTQRPQVTMWERDVSSDRQEPGRRGRSWGLEGSQALSQQAEVIVRQLQELRRLEEEVRLLRETSLQQKMRLEAQAMELEALARAEKAGRAEAEGLRAALAGAEVVRKNLEE

SEQ ID NO: 2662 - protein, 944 aa, Homo sapiens
MGIGLCVPPARCWKRLTRSSRGQPLERPAATIIIGLSIVERSKQTQRGPVDFSRSHSAPAAEQECKPRISAARSTPAPPSPAVPGFRTTPCQTFTAWCNSHLRKAGTQIENIEEDFRNGLKLMLLLEVISGERLPRPDKGKMRFHKIANVNKALDFIASKGVKLVSIGAEEIVDGNLKMTLGMIWTIILRFAIQDISVEETSAKEGLLLWCQRKTAPYRNVNVQNFHTSWKDGLALCALIHRHRPDLIDYAKLRKDDPIGNLNTAFEVAEKYLDIPKMLDAEDIVNTPKPDEKAIMTYVSCFYHAFAGAEQAETAANRICKVLAVNQENEKLMEEYEKLASELLEWIRRTVPWLENRVGEPSMSAMQRKLEDFRDYRRLHKPPRIQEKCQLEINFNTLQTKLRLSHRPAFMPSEGKLVSDIANAWRGLEQVEKGYEDWLLSEIRRLQRLQHLAEKFRQKASLHEAWTRGKEEMLSQRDYDSALLQEVRALLRRHEAFESDLAAHQDRVEHIAALAQELNELDYHEAASVNSRCQAICDQWDNLGTLTQKRRDALERMEKLLETIDRLQLEFARRAAPFNNWLDGAVEDLQDVWLVHSVEETQSLLTAHDQFKATLPEADRERGAIMGIQGEIQKICQTYGLRPCSTNPYITLSPQDINTKWDMVRKLVPSCDQTLQEELARQQVNERLRRQFAAQANAIGPWIQAKVEEVGRLAAGLAGSLEEQMAGLRQQEQNIINYKTNIDRLEGDHQLLQESLVFDNKHTVYSMEHIRVGWEQLLTSIARTINEVENQVLTRDAKGLSQEQLNEFRASFNHFDRKQNGMMEPDDFRACLISMGYDLGEVEFARIMTMVDPNAAGVVTFQAFIDFMTRETAETDTTEQVVASFKILAGDKNYITPEELRRELPAKQAEYCIRRMVPYKGSGAPAGALDYVAFSSALYGESDL

SEQ ID NO: 2663 - protein, 161 aa, Homo sapiens
MKLLHVFLLFLCFHLRFCKVTYTSQEDLVEKKCLAKKYTHLSCDKVFCQPWQRCIEGTCVCKLPYQCPKNGTAVCATNRRSFPTYCQQKSLECLHPGTKFLNNGTCTAEGKFSVSLKHGNTDSEGIVEVKLVDQDKTMFICKSSWSMREANVACLDLGFQQ

SEQ ID NO: 2664 - protein, 973 aa, Homo sapiens
MEVTCLLLLALIPFHCRGQGVYAPAQAQIVHAGQACVVKEDNISERVYTIREGDTLMLQCLVTGHPRPQVRWTKTAGSASDKFQETSVFNETLRIERIARTQGGRYYCKAENGVGVPAIKSIRVDVQYLDEPMLTVHQTVSDVRGNFYQEKTVFLRCTVNSNPPARFIWKRGSDTLSHSQDNGVDIYEPLYTQGETKVLKLKNLRPQDYASYTCQVSVRNVCGIPDKAITFRLTNTTAPPALKLSVNETLVVNPGENVTVQCLLTGGDPLPQLQWSHGPGPLPLGALAQGGTLSIPSVQARDSGYYNCTATNNVGNPAKKTVNLLVRSMKNATFQITPDVIKESENIQLGQDLKLSCHVDAVPQEKVTYQWFKNGKPARMSKRLLVTRNDPELPAVTSSLELIDLHFSDYGTYLCMASFPGAPVPDLSVEVNISSETVPPTISVPKGRAVVTVREGSPAELQCEVRGKPRPPVLWSRVDKEAALLPSGLPLEETPDGKLRLERVSRDMSGTYRCQTARYNGFNVRPREAQVQLNVQFPPEVEPSSQDVRQALGRPVLLRCSLLRGSPQRIASAVWRFKGQLLPPPPVVPAAAEAPDHAELRLDAVTRDSSGSYECSVSNDVGSAACLFQVSAKAYSPEFYFDTPNPTRSHKLSKNYSYVLQWTQREPDAVDPVLNYRLSIRQLNQHNAVVKAIPVRRVEKGQLLEYILTDLRVPHSYEVRLTPYTTFGAGDMASRIIHYTEPINSPNLSDNTCHFEDEKICGYTQDLTDNFDWTRQNALTQNPKRSPNTGPPTDISGTPEGYYMFIETSRPRELGDRARLVSPLYNASAKFYCVSFFYHMYGKHIGSLNLLVRSRNKGALDTHAWSLSGNKGNVWQQAHVPISPSGPFQIIFEGVRGPGYLGDIAIDDVTLKKGECPRKQTDPNKGARREGGGGAESGGSCAWRGFLSVEGGCLGLNRGSECLSDGNHVALTV

SEQ ID NO: 2665 - protein, 1260 aa, Homo sapiens
MDASYDGTEVTVVMEEIEEAYCYTSPGPPKKKKKYKIHGEKTKKPRSAYLLYYYDIYLKVQQELPHLPQSEINKKISESWRLLSVAERSYYLEKAKLEKEGLDPNSKLSALTAVVPDIPGFRKILPRSDYIIIPKSSLQEDRSCPQLELCVAQNQMSPKGPPLVSNTAPETVPSHAGMAEQCLAVEALAEEVGALTQSGAVQEIATSEILSQDVLLEDASLEVGESHQPYQTSLVIEETLVNGSPDLPTGSLAVPHPQVGESVSVVTVMRDSSESSSSAPATQFIMLPLPAYSVVENPTSIKLTTTYTRRGHGTCTSPGCSFTYVTRHKPPKCPTCGNFLGGKWIPKEKPAKVKVELASGVSSKGSVVKRNQQPVTTEQNSSKENASKLTLENSEAEAPGNCGTAVTKTPVVKSGVQPEVTLGTTDNDSPGADVPTPSEGTSTSSPLPAPKKPTGADLLTPGSRAPELKGRARGKPSLLAAARPMRAILPAPVNVGRGSSMGLPRARQAFSLSDKTPSVRTCGLKPSTLKQLGQPIQQPSGPGEVKLPSGPSNRTSQVKVVEVKPDMFPPYKYSCTVTLDLGLATSRGRGKCKNPSCSYVYTNRHKPRICPSCGVNLAKDRTEKTTKAIEVSSPLPDVLNATEPLSTAQREIQRQSTLQLLRKVLQIPENESELAEVFALIHELNSSRLILSNVSEETVTIEQTSWSNYYESPSTQCLLCSSPLFKGGQNSLAGPQECWLLTASRLQTVTAQVKMCLNPHCLALHSFIDIYTGLFNVGNKLLVSLDLLFAIRNQIKLGEDPRVSINVVLKSVQEQTEKTLTSEELSQLQELLCNGYWAFECLTVRDYNDMICGICGVAPKVEMAQRSEENVLALKSVEFTWPEFLGSNEVNVEDFWATMETEVIEQVAFPASIPITKFDASVIAPFFPPLMRGAVVVNTEKDKNLDVQPVPGSGSALVRLLQEGTCKLDEIGSYSEEKLQHLLRQCGIPFGAEDSKDQLCFSLLALYESVQNGARAIRPPRHFTGGKIYKVCPHQVVCGSKYLVRGESARDHVDLLASSRHWPPVYVVDMATSVALCADLCYPELTNQMWGRNQGCFSSPTEPPVSVSCPELLDQHYTVDMTETEHSIQHPVTKTATRRIVHAGLQPNPGDPSAGHHSLALCPELAPYATILASIVDSKPNGVRQRPIAFDNATHYYLYNRLMDFLTSREIVNRQIHDIVQSCQPGEVVIRDTLYRLGVAQIKTETEEEGEEEEVAAVAE

SEQ ID NO: 2666 - protein, 74 aa, Homo sapiens
MNKSRWQSRRRHGRRSHQQNPWFRLRDSEDRSDSRAAQPAHDSGHGDDESPSTSSGTAGTSSVPETLLPLAPWT

SEQ ID NO: 2667 - protein, 76 aa, Homo sapiens
MLFEGKVNPQTQSLLAECGEWTRRSLHLRVLGRQLILPTDKGVQHFQGSTPASAVHRPPLSACGHSSNIRELCISG

SEQ ID NO: 2668 - protein, 381 aa, Homo sapiens
MLVTFKDVAVTFTREEWRQLDLAQRTLYREVMLETCGLLVSLGDRAQVHTREPTTYPPVLSERAFLRGSLTLESSTSSDSRLGRARDEEGLLEMQKGKVTPETDLHKETHLGKVSLEGEGLGTDDGLHSRALQEWLSADVLHECDSQQPGKDALIHAGTNPYKCKQCGKGFNRKWYLVRHQRVHTGMKPYECNACGKAFSQSSTLIRHYLIHTGEKPYKCLECGKAFKRRSYLMQHHPIHTGEKPYECSQCRKAFTHRSTFIRHNRTHTGEKPFECKECEKAFSNRAHLIQHYIIHTGEKPYDCMACGKAFRCSSELIQHQRIHTGEKPYECTQCGKAFHRSTYLIQHSVIHTGEMPYKCIECGKAFKRRSHLLQHQRVHT

SEQ ID NO: 2669 - protein, 230 aa, Homo sapiens
MEADIITNLRCRLKEAEEERLKAAQYGLQLVESQNELQNQLDKCRNEMMTMTESYEQEKYTLQREVELKSRMLESLSCECEAIKQQQKMHLEKLEEQLSRSHGQEVNELKTKIEKLKVELDEARLSEKQLKHQVDHQKELLSCKSEELRVMSERVQESMSSEMLALQIELTEMESMKTTLKEEVNELQYRQEQLELLITNLMRQVDRLKEEKEEREKEAVSYYNALEKAR

SEQ ID NO: 2670 - protein, 646 aa, Homo sapiens
MSTENVEGKPSNLGERGRARSSTFLRVVQPMFNHSIFTSAVSPAAERIRFILGEEDDSPAPPQLFTELDELLAVDGQEMEWKETARWIKFEEKVEQGGERWSKPHVATLSLHSLFELRTCMEKGSIMLDREASSLPQLVEMIVDHQIETGLLKPELKDKVTYTLLRKHRHQTKKSNLRSLADIGKTVSSASRMFTNPDNGSPAMTHRNLTSSSLNDISDKPEKDQLKNKFMKKLPRDAEASNVLVGEVDFLDTPFIAFVRLQQAVMLGALTEVPVPTRFLFILLGPKGKAKSYHEIGRAIATLMSDEVFHDIAYKAKDRHDLIAGIDEFLDEVIVLPPGEWDPAIRIEPPKSLPSSDKRKNMYSGGENVQMNGDTPHDGGHGGGGHGDCEELQRTGRFCGGLIKDIKRKAPFFASDFYDALNIQALSAILFIYLATVTNAITFGGLLGDATDNMQGVLESFLGTAVSGAIFCLFAGQPLTILSSTGPVLVFERLLFNFSKDNNFDYLEFRLWIGLWSAFLCLILVATDASFLVQYFTRFTEEGFSSLISFIFIYDAFKKMIKLADYYPINSNFKVGYNTLFSCTCVPPDPGEGITLCVYARFVFGGRCRLHACKFSTCCHGPQELVLFFSLKNSATEFDVSLPEVF

SEQ ID NO: 2671 - protein, 378 aa, Homo sapiens
MERDGCAGGGSRGGEGGRAPREGPAGNGRDRGRSHAAEAPGDPQAAASLLAPMDVGEEPLEKAARARTAKDPNTYKVLSLVLSVCVLTTILGCIFGLKPSCAKEVKSCKGRCFERTFGNCRCDAACVELGNCCLDYQETCIEPEHIWTCNKFRCGEKRLTRSLCACSDDCKDKGDCCINYSSVCQGEKSWVEEPCESINEPQCPAGFETPPTLLFSLDGFRAEYLHTWGGLLPVISKLKKCGTYTKNMRPVYPTKTFPNHYSIVTGLYPESHGIIDNKMYDPKMNASFSLKSKEKFNPEWYKGEPIWVTAKYQGLKSGTFFWPGSDVEINGIFPDIYKMYNGSVPFEERILAVLQWLQLPKDERRTRFFRSFIWTSQQ

SEQ ID NO: 2672 - protein, 622 aa, Homo sapiens
MGKSEGPVGMVESAGRAGQKRPGFLEGGLLLLLLLVTAALVALGVLYADRRGKQLPRLASRLCFLQEERTFVKRKPRGIPEAQEVSEVCTTPGCVIAAARILQNMDPTTEPCDDFYQFACGGWLRRHVIPETNSRYSIFDVLRDELEVILKAVLENSTAKATVPQEERHDVIALYHRMGLEELQSQFGLKGFNWTLFIQTVLSSVKIKLLPDEEVVVYGIPYLQNLENIIDTYSARTIQNYLVWRLVLDRIGSLSQRFKDTRVNYRKALFGTMVEEVRWRECVGYVNSNMENAVGSLYVREAFPGDSKSMVRELIDKVRTVFVETLDELGWMDEESKKKAQEKAMSIREQIGHPDYILEEMNRRLDEEYSNLNFSEDLYFENSLQNLKVGAQRSLRKLREKVDPNLWIIGAAVVNAFYSPNRNQIVFPAGILQPPFFSKEQPQALNFGGIGMVIGHEITHGFDDNGRNFDKNGNMMDWWSNFSTQHFREQSECMIYQYGNYSWDLADEQNVNGFNTLGENIADNGGVRQAYKAYLKWMAEGGKDQQLPGLDLTHEQLFFINYAQVWCGSYRPEFAIQSIKTDVHSPLKYRVLGSLQNLAAFADTFHCARGTPMHPKERCRVW

SEQ ID NO: 2673 - protein, 230 aa, Homo sapiens
ASKKRLIEDTEDWRPRTGTTQSRSFRILAQITGTEHLKESEADNTKKANNSQEPSPQLASSVASTRSMPESLDSPTSGRPGVTSLTAAAAFKPVGSTGVIKSPSWQRPNQGVPSTGRISNSATYSGSVAPANSALGQTQPSDQDTLVQRAEHIPAGKRTPMCAHCNQVIRGPFLVALGKSWHPEEFNCAHCKNTMAYIGFVEEKGALYCELCYEKFFAPECGRCQRKILG

SEQ ID NO: 2674 - protein, 1469 aa, Homo sapiens
MWPSQLLIFMMLLAPIIHAFSRAPIPMAVVRRELSCESYPIELRCPGTDVIMIESANYGRTDDKICDSDPAQMENIRCYLPDAYKIMSQRCNNRTQCAVVAGPDVFPDPCPGTYKYLEVQYECVPYKVEQKVFLCPGLLKGVYQSEHLFESDHQSGAWCKDPLQASDKIYYMPWTPYRTDTLTEYSSKDDFIAGRPTTTYKLPHRVDGTGFVVYDGALFFNKERTRNIVKFDLRTRIKSGEAIIANANYHDTSPYRWGGKSDIDLAVDENGLWVIYATEQNNGKIVISQLNPYTLRIEGTWDTAYDKRSASNAFMICGILYVVKSVYEDDDNEATGNKIDYIYNTDQSKDSLVDVPFPNSYQYIAAVDYNPRDNLLYVWNNYHVVKYSLDFGPLDSRSGQAHHGQVSYISPPIHLDSELERPSVKDISTTGPLGMGSTTTSTTLRTTTLSPGRSTTPSVSGRRNRSTSTPSPAVEVLDDMTTHLPSASSQIPALEESCEAVEAREIMWFKTRQGQIAKQPCPAGTIGVSTYLCLAPDGIWDPQGPDLSNCSSPWVNHITQKLKSGETAANIARELAEQTRNHLNAGDITYSVRAMDQLVGLLDVQLRNLTPGGKDSAARSLNKLQKRERSCRAYVQAMVETVNNLLQPQALNAWRDLTTSDQLRAATMLLHTVEESAFVLADNLLKTDIVRENTDNIKLEVARLSTEGNLEDLKFPENMGHGSTIQLSANTLKQNGRNGEIRVAFVLYNNLGPYLSTENASMKLGTEALSTNHSVIVNSPVITAAINKEFSNKVYLADPVVFTVKHIKQSEENFNPNCSFWSYSKRTMTGYWSTQGCRLLTTNKTHTTCSCNHLTNFAVLMAHVEVKHSDAVHDLLLDVITWVGILLSLVCLLICIFTFCFFRGLQSDRNTIHKNLCISLFVAELLFLIGINRTDQPIACAVFAALLHFFFLAAFTWMFLEGVQLYIMLVEVFESEHSRRKYFYLVGYGMPALIVAVSAAVDYRSYGTDKVCWLRLDTYFIWSFIGPATLIIMLNVIFLGIALYKMFHHTAILKPESGCLDNINYEDNRPFIKSWVIGAIALLCLLGLTWAFGLMYINESTVIMAYLFTIFNSLQGMFIFIFHCVLQKKVRKEYGKCLRTHCCSGKSTESSIGSGKTSGSRTPGRYSTGSQSRIRRMWNDTVRKQSESSFITGDINSSASLNREGLLNNARDTSVMDTLPLNGNHGNSYSIASGEYLSNCVQIIDRGYNHNETALEKKILKELTSNYIPSYLNNHERSSEQNRNLMNKLVNNLGSGREDDAIVLDDATSFNHEESLGLELIHEESDAPLLPPRVYSTENHQPHHYTRRRIPQDHSESFFPLLTNEHTEDLQSPHRDSLYTSMPTLAGVAATESVTTSTQTEPPPAKCGDAEDVYYKSMPNLGSRNHVHQLHTYYQLGRGSSDGFIVPPNKDGTPPEGSSKGPAHLVTSL

SEQ ID NO: 2675 - protein, 85 aa, Homo sapiens
LKDGGKAAQANVRIGDVVLSIDGINAQGMTHLEAQNKIKGCTGSLNMTLQRASAAPKPEPVPVQKPTKKTHCGALYRVLSCTHSQ

SEQ ID NO: 2676 - protein, 340 aa, Homo sapiens
MKAIKKSLTEEEYLYLDFSHQTEGCIFPLHTSVTLFLLSYCDCKIFKICLVVTKEVSQWTRLCELTIPLAIENFLRESSDQPPTIPVEILQLEKKLSEPVRVHNDDKLRRQKLKQQKADGVGPPLTKGKAKSKVHTQETSEGLDSSSKSLELKVAFSKLTVQEEPATTNREPSHIRKAKASDLPPLEHVFAEGLYFTLADIVLLPCIHHFLVIISRKFSEKLVEFPLLASWYQRIQEVPGVKTAASKCGIQFLHLPKLLTTSTEQHPNLCEVPGVEEQSDPLFIGGPRPTMAKLMEKGIEVMFSPHPCPTWTLDWNVLPAAVSPKEDGVLLCHSGWNAVV

SEQ ID NO: 2677 - protein, 108 aa, Homo sapiens
MRLLLALLGVLLSVPGPPVLSLEASEEVELEPCLAPSLEQQEQELTVALGQPVRLCCGRAERGGHWYKEGSRLAPAGRVRGWRGRLEIASFLPEDAGRYLCLARGSMI

SEQ ID NO: 2678 - protein, 777 aa, Homo sapiens
EKCPAYPTELVFALDNSYDVTEESFNKTRDIITSIVNDLNIRENNCPVGARVAMVSYNSGTSYLIRWSDYNRKKQLLQQLSQIKYQDTTEPRDVGNAMRFVTRNVFKRTYAGANVRRVAVFFSNGQTASRSSIITATMEFSALDISPTVFAFDERVFLEAFGFDNTGTFQVIPVPPNGENQTLERLRRCALCYDKCFPNACIREAFLPEDSYMDVVFLIDNSRNIAKDEFKAVKALVSSVIDNFNIASDPLISDSGDRIALLSYSPWESSRRKMGTVKTEFDFITYDNQLLMKNHIQTSFQQLNGEATIGRALLWTTENLFPETPYLRKHKVIFVVSAGENYERKEFVKMMALRAKCQGYVIFVISLGSTRKDDMEELASYPLDQHLIQLGRIHKPDLNYIAKFLKPFLYSVRRGFNQYPPPMLEDACRLINLGGENIQNDGFQFVTELQEDFLGGNGFIGQELNSGRESPFVKTEDNGSDYLVYLPSQMFEPQKLMINYEKDQKSAEIASLTSGHENYGRKEEPDHTYEPGDVSLQEYYMDVAFLIDASQRVGSDEFKEVKAFITSVLDYFHIAPTPLTSTLGDRVAVLSYSPPGYMPNTEECPVYLEFDLVTYNSIHQMKHHLQDSQQLNGDVFIGHALQWTIDNVFVGTPNLRKNKVIFVISAGETNSLDKDVLRNVSLRAKCQGYSIFVFSFGPKHNDKELEELASHPLDHHLVQLGRTHKPDWNYIIKFVKPFVHLIRRAINKYPTEDMKATCVNMTSPNPENGGTENTVLW

SEQ ID NO: 2679 - protein, 224 aa, Homo sapiens
MRPLRPRAALLALLASLLAAPPVAPAEAPHLVHVDAARALWPLRRFWRSTGFWGSTGRGLSYNFTHLDGYLDLLRENQLLPGFELMGSASGHFTDFEDKQQVFEWKDLVSSLARRYIGRYGLAHVSKWNFETWNEPDHHDFDNVSMTMQGFLNYYDACSEGLRAASPALRLGGPGDSFHTPPRSPLSWGLLRHCHDGTNFFTGEAGVRLDYISLHRKGARSSIS

SEQ ID NO: 2680 - protein, 189 aa, Homo sapiens
GSKFSKTQTFQGCGILQPDPPANITVTAVARNPRWLSVTWQDPHSWNSSFYRLRFELRYRAERSKTFTTWMVKDLQHHCVIHDAWSGLRHVVQLRAQEEFGQGEWSEWSPEAMGTPWTESRSPPAENEVSTPMQALTTNKDDDNILFRDSANATSLPVQDSSSVPLPTFLVAGGSLAFGTLLCIAIVLR

SEQ ID NO: 2681 - protein, 398 aa, Homo sapiens
DPDQAASYTVEPDPRSRHLALSGPTFGIIVKHFPKLLPKVLVQGTVFARMAPEQKTELVCELQKLQYCVGMCGDGANDCGALKAADVGISLSQAEASVVSPFTSSMASIECVPMVIREGRCSLDTSFSVFKYMALYSLTQFISVLILYTINTNLGDLQFLAIDLVITTTVAVLMSRTGPALVLGRVRPPGALLSVPVLSSLLLQMVLVTGVQLGGYFLTLAQPWFVPLNRTVAAPDNLPNYENTVVFSLSSFQYLILAAAVSKGAPFRRPLYTNERARPVPPRLPAPPPAQAGLQEALQAAGTRAGRAALAAAARRPPEVVQAHGHPRHWNSLPLSHQLDPSPATPPPPPPTSLRLATVYTPPPRPPPPWGSVDYCPLPWTIPRRGGSPQLPSVLLSV

SEQ ID NO: 2682 - protein, 1931 aa, Homo sapiens
KTVLHMDGCLDTETPTVSIQENVDVASLKPISDSGINFTDAIWSPTCERRTCECHESIEKNKDKTDLPQSVVYQNEEGRWVTDLAYYTSFNSKQNLNVSLSDEMNEDFRSGSEAFDLIAQDEEEFNKEHQFIQEENIDAHNTSVALGDTSWGATINYSLLRKSRSTSDLDKDDASYLRLSLGEFFAQRSEALGCLGGGNNVKRPSFGYFIRSPEKREPIALIRKSDVSRGNLEKEMAHLNHDLYSGDLNEQSQAQLSEGSITLQVEAVESTSQVDENDVTLTADKGKTEDTFFMSNKPQRYKDKLPDSGDSMLRISTIASAIAEASVNTDPSQLAAMIKALSNKTRDKTFQEDEKQKDYSHVRHFLPNDLEKSNGSNALDMEKYLKKTEVSRYESALENFSRASMSDTWDLSLPKEQTTQDIHPVDLSATSVSVRAPEENTAAIVYVENGESENQESFRTINSSNSVTNRENNSAVVDVKTCSIDNKLQDVGNDEKATSISTPSDSYSSVRNPRITSLCLLKDCEEIRDNRENQRQNECVSEISNSEKHVTFENHRIVSPKNSDLKNTSPEHGGRGSEDEQESFRPSTSPLSHSSPSEISGTSSSGCALESFGSAAQQQQPPCEQELSPLVCSPAGVSRLTYVSEPESSYPTTATDDALEDRKSDITSELSTTIIQGSPAALEERAMEKLREKVPFQNRGKGTLSSIIQNNSDTRKATETTSLSSKPEYVKPDFRWSKDPSSKSGNLLETSEVGWTSNPEELDPIRLALLGKSGLSCQVGSATSHPVSCQEPIDEDQRISPKDKSTAGREFSGQVSHQTTSENQCTPIPSSTVHSSVADMQNMPAAVHALLTQPSLSAAPFAQRYLGTLPSTGSTTLPQCHAGNATVCGFSGGLPYPAVAGEPVQNSVAVGICLGSNIGSGWMGTSSLCNPYSNTLNQNLLSTTKPFPVPSVGTNCGIEPWDSGVTSGLGSVRVPEELKLPHACCVGIASQTLLSVLNPTDRWLQVSIGVLSISVNGEKVDLSTYRCLVFKNKAIIRPHATEEIKVLFIPSSPGVFRCTFSVASWPCSTDAETIVQAEALASTVTLTAIAESPVIEVETEKKDVLDFGDLTYGGWKALPLKLINRTHATVPIRLIINANAVAWRCFTFSKESVRAPVEVAPCADVVTRLAGPSVVNHMMPASYDGQDPEFLMIWVLFHSPKKQISSSDILDSAEEFSAKVDIEVDSPNPTPVLRSVSLRARAGIARIHAPRDLQTMHFLAKVASSRKQHLPLKNAGNIEVYLDIKVPEQGSHFSVDPKNLLLKPGEEHEVIVSFTPKDPEACEERILKIFVQPFGPQYEVVLKGEVISSGSKPLSPGPCLDIPSILSNKQFLAWGGVPLGRTQLQKLALRNNSASTTQHLRLLIRGQDQDCFQLQNTFGSEQRLTSNCEIRIHPKEDIFISVLFAPTRLSCMLARLEIKQLGNRSQPGIKFTIPLSGYGGTSNLILEGVKKLSDSYMVTVNGLVPGKESKIVFSVRNTGSRAAFVKAVGFKDSQKKVLLDPKVLRIFPDKFVLKERTQENVTLIYNPSDRGINNKTATELSTVYLFGGDEISRQQYRRALLHKPEMIKQILPEHSVLQNINFVEAFQDELLVTEVYDLPQRPNDVQLFYGSMCKIILSVIGEFRDCISSREFLQPSSKASLESTSDLGASGKHGGNVSLDVLPVKGPQGSPLLSRAARPPLDQLASEEPWTVLPEHLILVAPSPCDMAKTGRFQIVNNSVRLLRFELCWPAHCLTVTPQHGCVAPESKLQILVSPNSSLSTKQSMFPWSGLIYIHCDDGQKKIVKVQIREDLTQVELLTRLTSKPFGILSPVSEPSVSHLVKPMTKPPSTKVEIRNKSITFPTTEPGETSESCLELENHGTTDVKWHLSSLAPPYVKRWSLTTLPRLVSIS

SEQ ID NO: 2683 - protein, 555 aa, Homo sapiens
MERTGYSMVQENGQRKYGGPPPGWEGPHPQRGCEVFVGKIPRDVYEDELVPVFEAVGRIYELRLMMDFDGKNRGYAFVMYCHKHEAKRAVRELNNYEIRPGRLLGVCCSVDNCRLFIGGIPKMKKREEILEEIAKVTEGVLDVIVYASAADKMKNRGFAFVEYESHRAAAMARRKLMPGRIQLWGHQIAVDWAEPEIDVDEDVMETVKILYVRNLMIETTEDTIKKSFGQFNPGCVERVKKIRDYAFVHFTSREDAVHAMNNLNGTELEGSCLEVTLAKPVDKEQYSRYQKAARGGGAAEAAQQPSYVYSCDPYTLAYYGYPYNALIGPNRDYFVKAGSIRGRGRGAAGNRAPGPRGSYLGGYSAGRGIYSRYHEGKGKQQEKGYELVPNLEIPTVNPVAIKPGTVAIPAIGAQYSMFPAAPAPKMIEDGKIHTVEHMISPIAVQPDPASAAAAAAAAAAAAAAVIPTVSTPPPFQGRPITPVYTVAPNVQRIPTAGIYGASYVPFAAPATATIATLQKNAAAAAAMYGGYAGYIPQAFPAAAIQVPIPDVYQTY

SEQ ID NO: 2684 - protein, 669 aa, Homo sapiens
MACEIMPLQRLLERTIRSAVEQHLFDVNNSGGQSSEDSESGTLSASSATSARQRRRQSKEQDEVRHGRDKGLINKENTPSGFNHLDDCILNTQEVEKVHKNTFGCAGERSKPKRQKSSTKLSELHDNQDGLVNMESLNSTRSHERTGPDDFEWMSDERKGNEKDGGHTQHFESPTMKIQEHPSLSDTKQQRNQDAGDQEESFVSEVPQSDLTALCDEKNWEEPIPAFSSWQRENSDSDEAHLSPQAGRLIRQLLDEDSDPMLSPRFYAYGQSRQYLDDTEVPPSPPNSHSFMRRRSSSLGSYDDEQEDLTPAQLTRRIQSLKKKIRKFEDRFEEEKKYRPSHSDKAANPEVLKWTNDLAKFRRQLKESKLKISEEDLTPRMRQRSNTLPKSFGSQLEKEDEKKQELVDKAIKPSVEATLESIQRKLQEKRAESSRPEDIKDMTKDQIANEKVALQKALLYYESIHGRPVTKNERQVMKPLYDRYRLVKQILSRANTIPIIGSPSSKRRSPLLQPIIEGETASFFKEIKEEEEGSEDDSNVKPDFMVTLKTDFSARCFLDQFEDDADGFISPMDDKIPSKCSQDTGLSNLHAASIPELLEHLQEMREEKKRIRKKLRDFEDNFFRQNGRNVQKEDRTPMAEEYSEYKHIKAKLRLLEVLISKRDTDSKSM

SEQ ID NO: 2685 - protein, 446 aa, Homo sapiens
MDGESEVDFSSNSITPLWRRRSIPQPHQVLGRSKPRPQSYQSPNGLLITDFPVEDGGTLLAAQIPAQVPTASDSRTVHRSPLLLGAQRRAVANGGTASPEYRAASPRLRRPKSPKLPKAVPGGSPKSPANGAVTLPAPPPPPVLRPPRTPNAPAPCTPEEDLTGLTASPVPSPTANGLAANNDSPGSGSQSGRKAKDPERGLFPGPQKSSSEQKLPLQRLPSQENELLENPSVVLSTNSPAALKVGKQQIIPKSLASEIKISKSNNQNVEPHKRLLKVRSMVEGLGGPLGHAGEESEVDNDVDSPGSLRRGLRSTSYRRAVVSGFDFDSPTSSKKKNRMSQPVLKVVMEDKEKFSSLGRIKKKMLKGQGTFDGEENAVLYQNYKEKALDIDSDEESEPKEQKSDEKIVIHHKPLRSTWSQLSAVKRKVILIVGFMEMKDGRLRGGK

SEQ ID NO: 2686 - protein, 351 aa, Homo sapiens
MRQTLPCIYFWGGLLPFGMLCASSTTKCTVSHEVADCSHLKLTQVPDDLPTNITVLNLTHNQLRRLPAANFTRYSQLTSLDVGFNTISKLEPELCQKLPMLKVLNLQHNELSQLSDKTFAFCTNLTELHLMSNSIQKIKNNPFVKQKNLITLDLSHNGLSSTKLGTQVQLENLQELLLSNNKIQALKSEELDIFANSSLKKLELSSNQIKEFSPGCFHAIGRLFGLFLNNVQLGPSLTEKLCLELANTSIRNLSLSNSQLSTTSNTTFLGLKWTNLTMLDLSYNNLNVWLKCLEHLNMEDNDIPGIKSNMFTGLINLKYLSLSNSFTSLRTLTNETFVSLAHSPLHILNLT

SEQ ID NO: 2687 - protein, 1240 aa, Homo sapiens
MWPSQLLIFMMLLAPIIHAFSRAPIPMAVVRRELSCESYPIELRCPGTDVIMIESANYGRTDDKICDSDPAQMENIRCYLPDAYKIMSQRCNNRTQCAVVAGPDVFPDPCPGTYKYLEVQYECVPYKVEQKVFLCPGLLKGVYQSEHLFESDHQSGAWCKDPLQASDKIYYMPWTPYRTDTLTEYSSKDDFIAGRPTTTYKLPHRVDGTGFVVYDGALFFNKERTRNIVKFDLRTRIKSGEAIIANANYHDTSPYRWGGKSDIDLAVDENGLWVIYATEQNNGKIVISQLNPYTLRIEGTWDTAYDKRSASNAFMICGILYVVKSVYEDDDNEATGNKIDYIYNTDQSKDSLVDVPFPNSYQYIAAVDYNPRDNLLYVWNNYHVVKYSLDFGPLDSRSGQAHHGQVSYISPPIHLDSELERPSVKDISTTGPLGMGSTTTSTTLRTTTLSPGRSTTPSVSGRRNRSTSTPSPAVEVLDDMTTHLPSASSQIPALEESCEAVEAREIMWFKTRQGQIAKQPCPAGTIGVSTYLCLAPDGIWDPQGPDLSNCSSPWVNHITQKLKSGETAANIARELAEQTRNHLNAGDITYSVRAMDQLVGLLDVQLRNLTPGGKDSAARSLNKLQKRERSCRAYVQAMVETVNNLLQPQALNAWRDLTTSDQLRAATMLLHTVEESAFVLADNLLKTDIVRENTDNIKLEVARLSTEGNLEDLKFPENMGHGSTIQLSANTLKQNGRNGEIRVAFVLYNNLGPYLSTENASMKLGTEALSTNHSVIVNSPVITAAINKEFSNKVYLADPVVFTVKHIKQSEENFNPNCSFWSYSKRTMTGYWSTQGCRLLTTNKTHTTCSCNHLTNFAVLMAHVEVKHSDAVHDLLLDVITWVGILLSLVCLLICIFTFCFFRGLQSDRNTIHKNLCISLFVAELLFLIGINRTDQPIACAVFAALLHFFFLAAFTWMFLEGVQLYIMLVEVFESEHSRRKYFYLVGYGMPALIVAVSAAVDYRSYGTDKVCWLRLDTYFIWSFIGPATLIIMLNVIFLGIALYKMFHHTAILKPESGCLDNINYEDNRPFIKSWVIGAIALLCLLGLTWAFGLMYINESTVIMAYLFTIFNSLQGMFIFIFHCVLQKKVRKEYGKCLRTHCCSGKSTESSIGSGKTSGSRTPGRYSTGSQSRIRRMWNDTVRKQSESSFITGDINSSASLNREPYRETSMGVKLNIAYQIGASEQCQGYKCHGYSTTEW

SEQ ID NO: 2688 - protein, 1283 aa, Homo sapiens
MWPSQLLIFMMLLAPIIHAFSRAPIPMAVVRRELSCESYPIELRCPGTDVIMIESANYGRTDDKICDSDPAQMENIRCYLPDAYKIMSQRCNNRTQCAVVAGPDVFPDPCPGTYKYLEVQYECVPYKVEQKVFLCPGLLKGVYQSEHLFESDHQSGAWCKDPLQASDKIYYMPWTPYRTDTLTEYSSKDDFIAGRPTTTYKLPHRVDGTGFVVYDGALFFNKERTRNIVKFDLRTRIKSGEAIIANANYHDTSPYRWGGKSDIDLAVDENGLWVIYATEQNNGKIVISQLNPYTLRIEGTWDTAYDKRSASNAFMICGILYVVKSVYEDDDNEATGNKIDYIYNTDQSKDSLVDVPFPNSYQYIAAVDYNPRDNLLYVWNNYHVVKYSLDFGPLDSRSGQAHHGQVSYISPPIHLDSELERPSVKDISTTGPLGMGSTTTSTTLRTTTLSPGRSTTPSVSGRRNRSTSTPSPAVEVLDDMTTHLPSASSQIPALEESCEAVEAREIMWFKTRQGQIAKQPCPAGTIGVSTYLCLAPDGIWDPQGPDLSNCSSPWVNHITQKLKSGETAANIARELAEQTRNHLNAGDITYSVRAMDQLVGLLDVQLRNLTPGGKDSAARSLNKLQKRERSCRAYVQAMVETVNNLLQPQALNAWRDLTTSDQLRAATMLLHTVEESAFVLADNLLKTDIVRENTDNIKLEVARLSTEGNLEDLKFPENMGHGSTIQLSANTLKQNGRNGEIRVAFVLYNNLGPYLSTENASMKLGTEALSTNHSVIVNSPVITAAINKEFSNKVYLADPVVFTVKHIKQSEENFNPNCSFWSYSKRTMTGYWSTQGCRLLTTNKTHTTCSCNHLTNFAVLMAHVEVKHSDAVHDLLLDVITWVGILLSLVCLLICIFTFCFFRGLQSDRNTIHKNLCISLFVAELLFLIGINRTDQPIACAVFAALLHFFFLAAFTWMFLEGVQLYIMLVEVFESEHSRRKYFYLVGYGMPALIVAVSAAVDYRSYGTDKVCWLRLDTYFIWSFIGPATLIIMLNVIFLGIALYKMFHHTAILKPESGCLDNINYEDNRPFIKSWVIGAIALLCLLGLTWAFGLMYINESTVIMAYLFTIFNSLQGMFIFIFHCVLQKKVRKEYGKCLRTHCCSGKSTESSIGSGKTSGSRTPGRYSTGSQSRIRRMWNDTVRKQSESSFITGDINSSASLNRGAMANHLISNALLRPHGTNNPYNTLLGEPAVCNNPSVSMYNAQEPYRETSMGVKLNIAYQIGASEQCQGYKCHGYSTTEW

SEQ ID NO: 2689 - protein, 95 aa, Homo sapiens
LRLRSGLRHLRATPNTRGSARLLCAEMPKKAGATTKGKSQSKEPERPLPPLGPVAVDPKGCVTIAIHAKPGSKQNAVTALLFHSSTIGGDSGGRF

SEQ ID NO: 2690 - protein, 374 aa, Homo sapiens
MWVTLPIDLNNKSAKQQEVQFKAYYLPKDDEYYQFCYVDEDGVVRGASIPFQFRPENEEDILVVTTQGEVEEIEQHNKELCKENQELKDSCISLQKQNSDMQAELQKKQEELETLQSINKKLELKVKEQKDYWETELLQLKEQNQKMSSENEKMGIRVDQLQAQLSTQEKEMEKLVQGDQDKTEQLEQLKKENDHLFLSLTEQRKDQKKLEQTVEQMKQNETTAMKKQQELMDENFDLSKRLSENEIICNALQRQKERLEGENDLLKRENSRLLSYMGLDFNSLPYQVPTSDEGGARQNPGLAYGNPYSGIQESSSPSPLSIKKCPICKADDICDHTLEQQQMQPLCFNCPICDKIFPATEKQIFEDHVFCHSL

SEQ ID NO: 2691 - protein, 672 aa, Homo sapiens
MDLILNRMDYLQVGVTSQKTMKLIPASRHRATQKVVIGDHDGVVMCFGMKKGEAAAVFKTLPGPKIARLELGGVINTPQEKIFIAAASEIRGFTKRGKQFLSFETNLTESIKAMHISGSDLFLSASYIYNHYCDCKDQHYYLSGDKINDVICLPVERLSRITPVLACQDRVLRVLQGSDVMYAVEVPGPPTVLALHNGNGGDSGEDLLFGTSDGKLALIQITTSKPVRKWEIQNEKKRGGILCIDSFDIVGDGVKDLLVGRDDGMVEVYSFDNANEPVLRFDQMLSESVTSIQGGCVGKDSYDEIVVSTYSGWVTGLTTEPIHKESGPGEELKINQEMQNKISSLRNELEHLQYKVLQERENYQQSSQSSKAKSAVPSFGINDKFTLNKDDASYSLILEVQTAIDNVLIQSDVPIDLLDVDKNSAVVSFSSCDSESNDNFLLATYRCQADTTRLELKIRSIEGQYGTLQAYVTPRIQPKTCQVRQYHIKPLSLHQRTHFIDHDRPMNTLTLTGQFSFAEVHSWVVFCLPEVPEKPPAGECVTFYFQNTFLDTQLESTYRKGEGVFKSDNISTISILKDVLSKEATKRKINLNISYEINEVSVKHTLKLIHPKLEYQLLLAKKVQLIDALKELQIHEGNTNFLIPEYHCILEEADHLQEEYKKQPAHLERLYG

SEQ ID NO: 2692 - protein, 422 aa, Homo sapiens
MTFLIVTVAWAAHTRLFQVVGKTDDTLALLNLACMMTITFLPYTFSLMVTFPDVPLGIFLFCVCVIAIGVVQALIVGYAFHFPHLLSPQIQRSAHRALYRRHVLGIVLQGPALCFAAAIFSLFFVPLSYLLMVTVILLPYVSKVTGWCRDRLLGHREPSAHPVEVFSFDLHEPLSKERVEAFSDGVYAIVATLLILDICEDNVPDPKDVKERFSGSLVAALSATGPRFLAYFGSFATVGLLWFAHHSLFLHVRKATRAMGLLNTLSLAFVGGLPLAYQQTSAFARQPRDELERVRVSCTIIFLASIFQLAMWTTALLHQAETLQPSVWFGGREHVLMFAKLALYPCASLLAFASTCLLSRFSVGIFHLMQIAVPCAFLLLRLLVGLALATLRVLRGLARPEHPPPAPTGQDDPQSQLLPAPC

SEQ ID NO: 2693 - protein, 627 aa, Homo sapiens
MLDLSYNNLNVVGNDSFAWLPQLEYFFLEYNNIQHLFSHSLHGLFNVRYLNLKRSFTKQSISLASLPKIDDFSFQWLKCLEHLNMEDNDIPGIKSNMFTGLINLKYLSLSNSFTSLRTLTNETFVSLAHSPLHILNLTKNKISKIESDAFSWLGHLEVLDLGLNEIGQELTGQEWRGLENIFEIYLSYNKYLQLTRNSFALVPSLQRLMLRRVALKNVDSSPSPFQPLRNLTILDLSNNNIANINDDMLEGLEKLEILDLQHNNLARLWKHANPGGPIYFLKGLSHLHILNLESNGFDEIPVEVFKDLFELKIIDLGLNNLNTLPASVFNNQVSLKSLNLQKNLITSVEKKVFGPAFRNLTELDMRFNPFDCTCESIAWFVNWINETHTNIPELSSHYLCNTPPHYHGFPVRLFDTSSCKDSAPFELFFMINTSILLIFIFIVLLIHFEGWRISFYWNVSVHRVLGFKEIDRQTEQFEYAAYIIHAYKDKDWVWEHFSSMEKEDQSLKFCLEERDFEAGVFELEAIVNSIKRSRKIIFVITHHLLKDPLCKRFKVHHAVQQAIEQNLDSIILVFLEEIPDYKLNHALCLRRGMFKSHCILNWPVQKERIGAFRHKLQVALGSKNSVH

SEQ ID NO: 2694 - protein, 88 aa, Homo sapiens
MEADIITNLRCRLKEAEEERLKAAQYGLQLVESQNELQNQLDKCRNEMMTMTESYEQEKYTLQREVELKSRMLESLSCECEAIKQQQK

SEQ ID NO: 2695 - protein, 1308 aa, Homo sapiens
MWPSQLLIFMMLLAPIIHGGKHSERHPALAAPLRHAERSPGGALPPRHLLQQPAAERTAAHRGQGPRGATRGVRGPGAQGAQIAAQAFSRAPIPMAVVRRELSCESYPIELRCPGTDVIMIESANYGRTDDKICDSDPAQMENIRCYLPDAYKIMSQRCNNRTQCAVVAGPDVFPDPCPGTYKYLEVQYECVPYKVEQKVFLCPGLLKGVYQSEHLFESDHQSGAWCKDPLQASDKIYYMPWTPYRTDTLTEYSSKDDFIAGRPTTTYKLPHRVDGTGFVVYDGALFFNKERTRNIVKFDLRTRIKSGEAIIANANYHDTSPYRWGGKSDIDLAVDENGLWVIYATEQNNGKIVISQLNPYTLRIEGTWDTAYDKRSASNAFMICGILYVVKSVYEDDDNEATGNKIDYIYNTDQSKDSLVDVPFPNSYQYIAAVDYNPRDNLLYVWNNYHVVKYSLDFGPLDSRSGQAHHGQVSYISPPIHLDSELERPSVKDISTTGPLGMGSTTTSTTLRTTTLSPGRSTTPSVSGRRNRSTSTPSPAVEVLDDMTTHLPSASSQIPALEESCEAVEAREIMWFKTRQGQIAKQPCPAGTIGVSTYLCLAPDGIWDPQGPDLSNCSSPWVNHITQKLKSGETAANIARELAEQTRNHLNAGDITYSVRAMDQLVGLLDVQLRNLTPGGKDSAARSLNKLQKRERSCRAYVQAMVETVNNLLQPQALNAWRDLTTSDQLRAATMLLHTVEESAFVLADNLLKTDIVRENTDNIKLEVARLSTEGNLEDLKFPENMGHGSTIQLSANTLKQNGRNGEIRVAFVLYNNLGPYLSTENASMKLGTEALSTNHSVIVNSPVITAAINKEFSNKVYLADPVVFTVKHIKQSEENFNPNCSFWSYSKRTMTGYWSTQGCRLLTTNKTHTTCSCNHLTNFAVLMAHVEVKHSDAVHDLLLDVITWVGILLSLVCLLICIFTFCFFRGLQSDRNTIHKNLCISLFVAELLFLIGINRTDQPIACAVFAALLHFFFLAAFTWMFLEGVQLYIMLVEVFESEHSRRKYFYLVGYGMPALIVAVSAAVDYRSYGTDKVCWLRLDTYFIWSFIGPATLIIMLNVIFLGIALYKMFHHTAILKPESGCLDNINYEDNRPFIKSWVIGAIALLCLLGLTWAFGLMYINESTVIMAYLFTIFNSLQGMFIFIFHCVLQKKVRKEYGKCLRTHCCSGKSTESSIGSGKTSGSRTPGRYSTGSQSRIRRMWNDTVRKQSESSFITGDINSSASLNREPYRETSMGVKLNIAYQIGASEQCQGYKCHGYSTTEW

SEQ ID NO: 2696 - protein, 155 aa, Homo sapiens
MEEPQSDPSVEPPLSQETFSDLWKLLPENNVLYSPALNKMFCQLAKTCPVQLWVDSTPPPGTRVRAMAIYKQSQHMTEVVRRCPHHERCSDSDGLAPPQHLIRVEGNLRVEYLDDRNTFRHSVVVPYEPPEVGSDCTTIHYNYMCNSSCMGGMNR

SEQ ID NO: 2697 - protein, 188 aa, Homo sapiens
LEPATEYMARVRCADASHFWKWSEWSGQNFTTLEAAPSEAPDVWRIVSLEPGNHTVTLFWKPLSKLHANGKILFYNVVVENLDKPSSSELHSIPAPANSTKLILDRCSYQICVIANNSVGASPASVIVISADPENSVSTCFSGTVPSVWGEGDFSHGSGHFCPGDSSTYMGNYLKFIQVTATLTNSHH

SEQ ID NO: 2698 - protein, 136 aa, Homo sapiens
FRQKYWNKLQTLRQQPFAYGTLTVRSLLDTREHCLNEFNFPDPYSKVKQRENGVALRCFPGVVRSLDALGWEERQLALVKGLLAGNVFDWGAKAVSAVLESDPYFGFEEAKRKLQERPWLVDSYSEWLQRLKITVE

SEQ ID NO: 2699 - protein, 86 aa, Homo sapiens
MNWFGSNFFRCPEDLSLLNIYSPLLSHMSSEDEHFISNLRGHVPASAVVKQPVRGASGRTTITAIVQTGGGWSTGLFSVCRDRRIL

SEQ ID NO: 2700 - protein, 246 aa, Homo sapiens
MALYLNGATVVAGFGGALGYLLGAIDWAHLELGRLLGTEFQVMFFFSALVLTLCFTVHLCSISEAPLTEVAKGIPPQQTPQDPPLSSDGMYEYGSIEKVKNGYVNPELAMQGAKNKNHAEQTRRAMTLKSLLRALVNMPPHYRYLCISHLIGWTAFLSNMLFFTDFMGQIVYRGDPYSAHNSTEFLIYERGVEVGCWGLCINSVFSSLYSYFQKVLVSYIGLKGLYFTGYLLFGLGTGFIGLFPNV

SEQ ID NO: 2701 - protein, 1351 aa, Homo sapiens
MWPSQLLIFMMLLAPIIHGGKHSERHPALAAPLRHAERSPGGALPPRHLLQQPAAERTAAHRGQGPRGATRGVRGPGAQGAQIAAQAFSRAPIPMAVVRRELSCESYPIELRCPGTDVIMIESANYGRTDDKICDSDPAQMENIRCYLPDAYKIMSQRCNNRTQCAVVAGPDVFPDPCPGTYKYLEVQYECVPYKVEQKVFLCPGLLKGVYQSEHLFESDHQSGAWCKDPLQASDKIYYMPWTPYRTDTLTEYSSKDDFIAGRPTTTYKLPHRVDGTGFVVYDGALFFNKERTRNIVKFDLRTRIKSGEAIIANANYHDTSPYRWGGKSDIDLAVDENGLWVIYATEQNNGKIVISQLNPYTLRIEGTWDTAYDKRSASNAFMICGILYVVKSVYEDDDNEATGNKIDYIYNTDQSKDSLVDVPFPNSYQYIAAVDYNPRDNLLYVWNNYHVVKYSLDFGPLDSRSGQAHHGQVSYISPPIHLDSELERPSVKDISTTGPLGMGSTTTSTTLRTTTLSPGRSTTPSVSGRRNRSTSTPSPAVEVLDDMTTHLPSASSQIPALEESCEAVEAREIMWFKTRQGQIAKQPCPAGTIGVSTYLCLAPDGIWDPQGPDLSNCSSPWVNHITQKLKSGETAANIARELAEQTRNHLNAGDITYSVRAMDQLVGLLDVQLRNLTPGGKDSAARSLNKLQKRERSCRAYVQAMVETVNNLLQPQALNAWRDLTTSDQLRAATMLLHTVEESAFVLADNLLKTDIVRENTDNIKLEVARLSTEGNLEDLKFPENMGHGSTIQLSANTLKQNGRNGEIRVAFVLYNNLGPYLSTENASMKLGTEALSTNHSVIVNSPVITAAINKEFSNKVYLADPVVFTVKHIKQSEENFNPNCSFWSYSKRTMTGYWSTQGCRLLTTNKTHTTCSCNHLTNFAVLMAHVEVKHSDAVHDLLLDVITWVGILLSLVCLLICIFTFCFFRGLQSDRNTIHKNLCISLFVAELLFLIGINRTDQPIACAVFAALLHFFFLAAFTWMFLEGVQLYIMLVEVFESEHSRRKYFYLVGYGMPALIVAVSAAVDYRSYGTDKVCWLRLDTYFIWSFIGPATLIIMLNVIFLGIALYKMFHHTAILKPESGCLDNINYEDNRPFIKSWVIGAIALLCLLGLTWAFGLMYINESTVIMAYLFTIFNSLQGMFIFIFHCVLQKKVRKEYGKCLRTHCCSGKSTESSIGSGKTSGSRTPGRYSTGSQSRIRRMWNDTVRKQSESSFITGDINSSASLNRGAMANHLISNALLRPHGTNNPYNTLLGEPAVCNNPSVSMYNAQEPYRETSMGVKLNIAYQIGASEQCQGYKCHGYSTTEW

SEQ ID NO: 2702 - protein, 807 aa, Homo sapiens
MEIPFEEVLERAKAGDPKAQTEVGKHYLQLAGDTDEELNSCTAVDWLVLAAKQGRREAVKLLRRCLADRRGITSENEREVRQLSSETDLERAVRKAALVMYWKLNPKKKKQVAVAELLENVGQVNEHDGGAQPGPVPKSLQKQRRMLERLVSSESKNYIALDDFVEITKKYAKGVIPSSLFLQDDEDDDELAGKSPEDLPLRLKVVKYPLHAIMEIKEYLIDMASRAGMHWLSTIIPTHHINALIFFFIVSNLTIDFFAFFIPLVIFYLSFISMVICTLKVFQDSKAWENFRTLTDLLLRFEPNLDVEQAEVNFGWNHLEPYAHFLLSVFFVIFSFPIASKDCIPCSELAVITGFFTVTSYLSLSTHAEPYTRRALATEVTAGLLSLLPSMPLNWPYLKVLGQTFITVPVGHLVVLNVSVPCLLYVYLLYLFFRMAQLRNFKGTYCYLVPYLVCFMWCELSVVILLESTGLGLLRASIGYFLFLFALPILVAGLALVGVLQFARWFTSLELTKIAVTVAVCSVPLLLRWWTKASFSVVGMVKSLTRSSMVKLILVWLTAIVLFCWFYVYRSEGMKVYNSTLTWQQYGALCGPRAWKETNMARTQILCSHLEGHRVTWTGRFKYVRVTDIDNSAESAINMLPFFIGDWMRCLYGEAYPACSPGNTSTAEEELCRLKLLAKHPCHIKKFDRYKFEITVGMPFSSGADGSRSREEDDVTKDIVLRASSEFKSVLLSLRQGSLIEFSTILEGRLGSKWPVFELKAISCLNCMAQLSPTRRHVKIEHDWRSTVHGAVKFAFDFFFFPFLSAA

SEQ ID NO: 2703 - protein, 165 aa, Homo sapiens
MEEPQSDPSVEPPLSQETFSDLWKLLPENNVLSPLPSQAMDDLMLSPDDIEQWFTEDPGPDEAPRMPEAAPPVAPAPAAPTPAAPAPAPSWPLSSSVPSQKTYQGSYGFRLGFLHSGTAKSVTCTYSPALNKMFCQLAKTCPVQLWVDSTPPPGTRVRAMAIYKQ

SEQ ID NO: 2704 - protein, 1231 aa, Homo sapiens
MWPSQLLIFMMLLAPIIHAFSRAPIPMAVVRRELSCESYPIELRCPGTDVIMIESANYGRTDDKICDSDPAQMENIRCYLPDAYKIMSQRCNNRTQCAVVAGPDVFPDPCPGTYKYLEVQYECVPYKVEQKVFLCPGLLKGVYQSEHLFESDHQSGAWCKDPLQASDKIYYMPWTPYRTDTLTEYSSKDDFIAGRPTTTYKLPHRVDGTGFVVYDGALFFNKERTRNIVKFDLRTRIKSGEAIIANANYHDTSPYRWGGKSDIDLAVDENGLWVIYATEQNNGKIVISQLNPYTLRIEGTWDTAYDKRSASNAFMICGILYVVKSVYEDDDNEATGNKIDYIYNTDQSKDSLVDVPFPNSYQYIAAVDYNPRDNLLYVWNNYHVVKYSLDFGPLDSRSGQAHHGQVSYISPPIHLDSELERPSVKDISTTGPLGMGSTTTSTTLRTTTLSPGRSTTPSVSGRRNRSTSTPSPAVEVLDDMTTHLPSASSQIPALEESCEAVEAREIMWFKTRQGQIAKQPCPAGTIGVSTYLCLAPDGIWDPQGPDLSNCSSPWVNHITQKLKSGETAANIARELAEQTRNHLNAGDITYSVRAMDQLVGLLDVQLRNLTPGGKDSAARSLNKLQKRERSCRAYVQAMVETVNNLLQPQALNAWRDLTTSDQLRAATMLLHTVEESAFVLADNLLKTDIVRENTDNIKLEVARLSTEGNLEDLKFPENMGHGSTIQLSANTLKQNGRNGEIRVAFVLYNNLGPYLSTENASMKLGTEALSTNHSVIVNSPVITAAINKEFSNKVYLADPVVFTVKHIKQSEENFNPNCSFWSYSKRTMTGYWSTQGCRLLTTNKTHTTCSCNHLTNFAVLMAHVEVKHSDAVHDLLLDVITWVGILLSLVCLLICIFTFCFFRGLQSDRNTIHKNLCISLFVAELLFLIGINRTDQPIACAVFAALLHFFFLAAFTWMFLEGVQLYIMLVEVFESEHSRRKYFYLVGYGMPALIVAVSAAVDYRSYGTDKVCWLRLDTYFIWSFIGPATLIIMLNVIFLGIALYKMFHHTAILKPESGCLDNIKSWVIGAIALLCLLGLTWAFGLMYINESTVIMAYLFTIFNSLQGMFIFIFHCVLQKKVRKEYGKCLRTHCCSGKSTESSIGSGKTSGSRTPGRYSTGSQSRIRRMWNDTVRKQSESSFITGDINSSASLNREPYRETSMGVKLNIAYQIGASEQCQGYKCHGYSTTEW

SEQ ID NO: 2705 - protein, 35 aa, Homo sapiens
ARLLCAEMPKKAGATTKASSRVKARARNQRDHFLP

SEQ ID NO: 2706 - protein, 489 aa, Homo sapiens
MDECGSRIRRRVSLPKRNRPSLGCIFGAPTAAELVPGDEGKEEEEMVAENRRRKTAGVLPVEVQPLLLSDSPECLVLGGGDTNPDLLRHMPTDRGVGDQPNDSEVDMFGDYDSFTENSFIAQVDDLEQKYMQLPEHKKHATDFATENLCSESIKNKLSITTIGNLTELQTDKHTENQSGYEGVTIEPGADLLYDVPSSQAIYFENLQNSSNDLGDHSMKERDWKSSSHNTVNEELPHNCIEQPQQNDESSSKVRTSSDMNRRKSIKDHLKNAMTGNAKAQTPIFSRSKQLKDTLLSEEINVAKKTVESSSNDLGPFYSLPSKVRDLYAQFKGIEKLYEWQHTCLTLNSVQERKNLIYSLPTSGGKTLVAEILMLQELLCCRKDVLMILPYVAIVQEKISGLSSFGIELGFFVEEYAGSKGRFPPTKRREKKSLYIATIEKGHSLVNSLIETGRIDSLGLVVVDELHMIGEGSRGATLEMTLAKILYTSS

SEQ ID NO: 2707 - protein, 2263 aa, Homo sapiens
QQLCILPPHHVNVLPPLHIKTEQSFRLIPLQHSKVASVVRDQNLSNVWTVEYALELLFIGGLVPEAVWLAYKLGDWKTSVSIGVAFQLFCKRDSNFMRSKKKSLNLPLRMTPAQIFQEKLQCVLGQPASLEAKNEMGSKYKQFTDPIEEEDANLLFGSVQEVLKASVMADADILSETFQLLIDSAKDFSKRLWGLVPFGLYLPAPPLYCPQPAILSEEDGDDLLLKAEKNNRQKVSGILQRVLLLFRAAQCSFPVAQWYILQLRWARKVMQKIRMKGSLPSLSPFPQSLLNYCKGGIAFFRPGAAGDHKLDEVSIRAIGCFRELCALCWMLHVRDKLSYSCRQYQKARENVKGEKDLEVEFDSCMIEHCLSAVEWAYRMLPFSRFFNMEELIQDIILSLIGELPPIRKVAEIFVKAFPYPEDVRVPLRDKYHSLHQRLRHCVVKGPQTEEMMSVVMHSIQKVRVKALKRVQRNIGSFEVNIWEPIEEEKPDEAPGVDRYSLGTSLSRSTLTELGDSVVHSDADTFSEALSVEEKSRINIYQRNAPNHMELTSIHKPTDKRKMCNQKENPTKKEDHEKLSQNTLPVIGVWEFERDDDEYIKFLDLFLSYILERDLPYSRDADIPFLTSFSGKLREHELNSLLFDVHTTLKRHQSKTKSQNVFRAGSCFVVAPESYESEKSSSLNDEYGMHLENQKLSSSVLVNQGIKPFLQYPSNEVNKNEGMSGLFGLKQRSIYKIQDDTREKCLIQRSSNHIFWTPKSIKTRRCIFKAIQCNDINPQEDLPLALNTFGSIGRLLEWMIRWSNRRLLCDSGITESSSEYSPVIRVKTSTAAILTSLWLLEQPYFATYKAKNAIIKMVENRDTGCQIGPNIERESKSDAGGSVAVATPGGTEERNGQNKSCQNILNRMPTEAKNPDIKEINDDIISITHNTKKEFIDIDENLLEVEAFTEEEMDMHISDYEEDIEESVGGFRSPSLAICMMTLPQQLEEEFTEEVQCQREEPLETIMEEKSTEQKGMIEAFSHPGHTTPQSMQVDTSSEISSAQISTYKEKSSSVPLLISNGVNVASQPPAPTPQKTQRNEFTAQLPDCSESVRQMLQDEMFKLVQLQQINFMSLMQIVGSSFANLPDTQQLVQQSQSVHLGESQESNLRGCGDVEDSNKNLKERFFIKPQSMGENAREPRKNSPHCHEGTIPSGQNSTGNVQNVPHGSIPLCQLNGQPRKKGPIPSSQNLPSTSFYPAPAGNTHLYLLSTPSVVQKAPRLIPHAKTFSPGDGFPLLQFKSKQEFQPLFLHTGSIPQVPFRPLPQPREAWGLSDSFQPALPQRAAQTTPASHLNVSQYNTEARKKEVEQKTWAETVITEIPNHVNLDQYVGQENLTPQQDSSVFIKPEKLFDVKPGTLEISPHHSFGLPLLYLPLKPPNMFPSTSRASITVPSTPIQPIAEERKYPRLSLLHSHLSPENRCKKTQLIPLENLIAFKQSQQKLTHNLFEQGDAGHLQLLKVKIEPPEVRQGKDSKKRQRRRAEKELQEKRCEKLRRKPNVTFRPENSIINNDDSEIIKKPKEQQEHCGSHPLDDFDVPFEMLQDDNTSAGLHFMASVKKKAIGSQDASTNTDPEHEPLTAPQLLVPDVYLNLKLSSEMSEKPWSPSIPHTVTNLVGHTYINVIDIEANDLLQELPVREEPSNDNVIKQQSDHLAVPSSAELHYMAASVTNAVPPHNFKSQGLPKPEFRFKGQSTKSDSAEDYLLWKRLQGVSAACPAPSSAAHQLEHLSAKLQKIDEQLLAIQNIAENIEQDFPKPEMLDLHCDKIGPVDHIEFSSGPEFKKTLASKTISISEEVRFLTHMDEEDQSDKKETSEPEFSITENYSGQKTCVFPTADSAVSLSSSSDQNTTSPGMNSSDELCESVSVHPLQMTGLTDIADIIDDLIIKDGVSSEELGLTEQAMGTSRIQHYSGRHSQRTDKERREIQAWMKRKRKERMAKYLNELAEKRGQEHDPFCPRSNPLYMTSREIRLRQKMKHEKDRLLLSEHYSRRISQAYGLMNELLSESVQLPTLPQKPLPNKPSPTQSSSCQHCPSPRGENQHGHSFLINRPGKVKYMSKPSYIHKRKSFGQPQGSPWPHGTATFTIQKKAGGAKAAVRKATQSPVTFQKGSNAPCHSLQHTKKHGSAGLAPQTKQVCVEYEREETVVSPWTIPSEIHKILHESHNSLLQDLSPTEEEEPEHPFGVGGVDSVSESTGSILSKLDWNAIEDMVASVEDQGLSVHWALDL

SEQ ID NO: 2708 - protein, 3144 aa, Homo sapiens
MTDKSIVILSLMVFHSSFINGKTCRRQLVEEWHPQPSSYVVNWTLTENICLDFYRDCWFLGVNTKIDTSGNQAVPQICPLQIQLGDILVISSEPSLQFPEINLMNVSETSFVGCVQNTTTEDQLLFGCRLKGMHTVNSKWLSVGTHYFITVMASGPSPCPLGLRLNVTVKQQFCQESLSSEFCSGHGKCLSEAWSKTYSCHCQPPFSGKYCQELDACSFKPCKNNGSCINKRENWDEQAYECVCHPPFTGKNCSEIIGQCQPHVCFHGNCSNITSNSFICECDEQFSGPFCEVSAKPCVSLLFWKRGICPNSSSAYTYECPKGSSSQNGETDVSEFSLVPCQNGTDCIKISNDVMCICSPIFTDLLCKSIQTSCESFPLRNNATCKKCEKDYPCSCISGFTEKNCEKAIDHCKLLSINCLNEEWCFNIIGRFKYVCIPGCTKNPCWFLKNVYLIHQHLCYCGVTFHGICQDKGPAQFEYVWQLGFAGSEGEKCQGVIDAYFFLAANCTEDATYVNDPEDNNSSCWFPHEGTKEICANGCSCLSEEDSQEYRYLCFLRWAGNMYLENTTDDQENECQHEAVCKDEINRPRCSCSLSYIGRLCVVNVDYCLGNHSISVHGLCLALSHNCNCSGLQRYERNICEIDTEDCKSASCKNGTTSTHLRGYFFRKCVPGFKGTQCEIDIDECASHPCKNGATCIDQPGNYFCQCVPPFKVVDGFSCLCNPGYVGIRCEQDIDDCILNACEHNSTCKDLHLSYQCVCLSDWEGNFCEQESNECKMNPCKNNSTCTDLYKSYRCECTSGWTGQNCSEEINECDSDPCMNGGLCHESTIPGQFVCLCPPLYTGQFCHQRYNLCDLLHNPCRNNSTCLALVDANQHCICREEFEGKNCEIDVKDCLFLSCQDYGDCEDMVNNFRCICRPGFSGSLCEIEINECSSEPCKNNGTCVDLTNRFFCNCEPEYHGPFCELDVNKCKISPCLDEENCVYRTDGYNCLCAPGYTGINCEINLDECLSEPCLHDGVCIDGINHYTCDCKSGFFGTHCETNANDCLSNPCLHGRCTELINEYPCSCDADGTSTQCKIKINDCTSIPCMNEGFCQKSAHGFTCICPRGYTGAYCEKSIDNCAEPELNSVICLNGGICVDGPGHTFDCRCLPGFSGQFCEININECSSSPCLHGADCEDHINGYVCKCQPGWSGHHCENELECIPNSCVHELCMENEPGSTCLCTPGFMTCSIGLLCGDEIRRITCLTPIFQRTDPISTQTYTIPPSETLVSSFPSIKATRIPAIMDTYPVDQGPKQTGIVKHDILPTTGLATLRISTPLESYLLQELIVTRELSAKHSLLSSADVSSSRFLNFGIRDPAQIVQDKTSVSHMPIRTSAATLGFFFPDRRARTPFIMSSLMSDFIFPTQSLLFENCQTVALSATPTTSVIRSIPGADIELNRQSLLSRGFLLIAASISATPVVSRGAQEDIEEYSADSLISRREHWRLLSPSMSPIFPAKVIISKQVTILNSSALHRFSTKAFNPSEYQAITEASSNQRLTNIKSQAADSLRELSQTCATCSMTEIKSSREFSDQVLHSKQSHFYETFWMNSAILASWYALMGAQTITSGHSFSSATEITPSVAFTEVPSLFPSKKSAKRTILSSSLEESITLSSNLDVNLCLDKTCLSIVPSQTISSDLMNSDLTSKMTTDELSVSENILKLLKIRQYGITMGPTEVLNQESLLDMEKSKGSHTLFKLHPSDSSLDFELNLQIYPDVTLKTYSEITHANDFKNNLPPLTGSVPDFSEVTTNVAFYTVSATPALSIQTSSSMSVIRPDWPYFTDYMTSLKKEVKTSSEWSKWELQPSVQYQEFPTASRHLPFTRSLTLSSLESILAPQRLMISDFSCVRYYGDSYLEFQNVALNPQNNISLEFQTFSSYGLLLYVKQDSNLVDGFFIQLFIENGTLKYHFYCPGEAKFKSINTTVRVDNGQKYTLLIRQELDPCNAELTILGRNTQICESINHVLGKPLPKSGSVFIGGFPDLHGKIQMPVPVKNFTGCIEVIEINNWRSFIPSKAVKNYHINNCRSQGFMLSPTASFVDASDVTQGVDTMWTSVSPSVAAPSVCQQDVCHNGGTCHAIFLSSGIVSFQCDCPLHFTGRFCEKDAGLFFPSFNGNSYLELPFLKFVLEKEHNRTVTIYLTIKTNSLNGTILYSNGNNCGKQFLHLFLVEGRPSVKYGCGNSQNILTVSANYSINTNAFTPITIRYTTPVGSPGVVCMIEMTADGKPPVQKKDTEISHASQAYFESMFLGHIPANVQIHKKAGPVYGFRGCILDLQVNNKEFFIIDEARHGKNIENCHVPWCAHHLCRNNGTCISDNENLFCECPRLYSGKLCQFASCENNPCGNGATCVPKSGTDIVCLCPYGRSGPLCTDAINITQPRFSGTDAFGYTSFLAYSRISDISFHYEFHLKFQLANNHSALQNNLIFFTGQKGHGLNGDDFLAVGLLNGSVVYSYNLGSGIASIRSEPLNLSLGVHTVHLGKFFQEGWLKVDDHKNKSIIAPGRLVGLNVFSQFYVGGYSEYTPDLLPNGADFKNGFQGCIFTLQVRTEKDGHFRGLGNPEGHPNAGRSVGQCHASPCSLMKCGNGGTCIESGTSVYCNCTTGWKGSFCTETVSTCDPEHDPPHHCSRGATCISLPHGYTCFCPLGTTGIYCEQALSISDPSFRSNELSWMSFASFHVRKKTHIQLQFQPLAADGILFYAAQHLKAQSGDFLCISLVNSSVQLRYNLGDRTIILETLQKVTINGSTWHIIKAGRVGAEGYLDLDGINVTEKASTKMSSLDTNTDFYIGGVSSLNLVNPMAIENEPVGFQGCIRQVIINNQELQLTEFGAKGGSNVGDCDGTACGYNTCRNGGECTVNGTTFSCRCLPDWAGNTCNQSVSCLNNLCLHQSLCIPDQSFSYSCLCTLGWVGRYCENKTSFSTAKFMGNSYIKYIDPNYRMRNLQFTTISLNFSTTKTEGLIVWMGIAQNEENDFLAIGLHNQTLKIAVNLGERISVPMSYNNGTFCCNKWHHVVVIQNQTLIKAYINNSLILSEDIDPHKNFVALNYDGICYLGGFEYGRKVNIVTQEIFKTNFVGKIKDVVFFQEPKNIELIKLEGYNVYDGDEQNEVT

SEQ ID NO: 2709 - protein, 1503 aa, Homo sapiens
MWPSQLLIFMMLLAPIIHAFSRAPIPMAVVRRELSCESYPIELRCPGTDVIMIESANYGRTDDKICDSDPAQMENIRCYLPDAYKIMSQRCNNRTQCAVVAGPDVFPDPCPGTYKYLEVQYECVPYKVEQKVFLCPGLLKGVYQSEHLFESDHQSGAWCKDPLQASDKIYYMPWTPYRTDTLTEYSSKDDFIAGRPTTTYKLPHRVDGTGFVVYDGALFFNKERTRNIVKFDLRTRIKSGEAIIANANYHDTSPYRWGGKSDIDLAVDENGLWVIYATEQNNGKIVISQLNPYTLRIEGTWDTAYDKRSASNAFMICGILYVVKSVYEDDDNEATGNKIDYIYNTDQSKDSLVDVPFPNSYQYIAAVDYNPRDNLLYVWNNYHVVKYSLDFGPLDSRSGQAHHGQVSYISPPIHLDSELERPSVKDISTTGPLGMGSTTTSTTLRTTTLSPGRSTTPSVSGRRNRSTSTPSPAVEVLDDMTTHLPSASSQIPALEESCEAVEAREIMWFKTRQGQIAKQPCPAGTIGVSTYLCLAPDGIWDPQGPDLSNCSSPWVNHITQKLKSGETAANIARELAEQTRNHLNAGDITYSVRAMDQLVGLLDVQLRNLTPGGKDSAARSLNKLQKRERSCRAYVQAMVETVNNLLQPQALNAWRDLTTSDQLRAATMLLHTVEESAFVLADNLLKTDIVRENTDNIKLEVARLSTEGNLEDLKFPENMGHGSTIQLSANTLKQNGRNGEIRVAFVLYNNLGPYLSTENASMKLGTEALSTNHSVIVNSPVITAAINKEFSNKVYLADPVVFTVKHIKQSEENFNPNCSFWSYSKRTMTGYWSTQGCRLLTTNKTHTTCSCNHLTNFAVLMAHVEVKHSDAVHDLLLDVITWVGILLSLVCLLICIFTFCFFRGLQSDRNTIHKNLCISLFVAELLFLIGINRTDQPIACAVFAALLHFFFLAAFTWMFLEGVQLYIMLVEVFESEHSRRKYFYLVGYGMPALIVAVSAAVDYRSYGTDKVCWLRLDTYFIWSFIGPATLIIMLNVIFLGIALYKMFHHTAILKPESGCLDNIKSWVIGAIALLCLLGLTWAFGLMYINESTVIMAYLFTIFNSLQGMFIFIFHCVLQKKVRKEYGKCLRTHCCSGKSTESSIGSGKTSGSRTPGRYSTGSQSRIRRMWNDTVRKQSESSFITGDINSSASLNRGAMANHLISNALLRPHGTNNPYNTLLGEPAVCNNPSVSMYNAQEGLLNNARDTSVMDTLPLNGNHGNSYSIASGEYLSNCVQIIDRGYNHNETALEKKILKELTSNYIPSYLNNHERSSEQNRNLMNKLVNNLGSGREDDAIVLDDATSFNHEESLGLELIHEESDAPLLPPRVYSTENHQPHHYTRRRIPQDHSESFFPLLTNEHTEDLQSPHRDSLYTSMPTLAGVAATESVTTSTQTEPPPAKCGDAEDVYYKSMPNLGSRNHVHQLHTYYQLGRGSSDGFIVPPNKDGTPPEGSSKGPAHLVTSL

SEQ ID NO: 2710 - protein, 483 aa, Homo sapiens
MSNYSVSLVGPAPWGFRLQGGKDFNMPLTISSLKDGGKAAQANVRIGDVVLSIDGINAQGMTHLEAQNKIKGCTGSLNMTLQRASAAPKPEPVPVQKPTVTSVCSETSQELAEGQRRGSQGDSKQQNGKIPPKRPPRKHIVERYTEFYHVPTHSDASKKRLIEDTEDWRPRTGTTQSRSFRILAQITGTEHLKESEADNTKKANNSQEPSPQLASSVASTRSMPESLDSPTSGRPGVTSLTAAAAFKPVGSTGVIKSPSWQRPNQGVPSTGRISNSATYSGSVAPANSALGQTQPSDQDTLVQRAEHIPAGKRTPMCAHCNQVIRGPFLVALGKSWHPEEFNCAHCKNTMAYIGFVEEKGALYCELCYEKFFAPECGRCQRKILGEVISALKQTWHVSCFVCVACGKPIRNNVFHLEDGEPYCETDYYALFGTICHGCEFPIEAGDMFLEALGYTWHDTCFVCSVCCESLEGQTFFSKKDKPL

SEQ ID NO: 2711 - protein, 1243 aa, Homo sapiens
MPKIVLNGVTVDFPFQPYKCQQEYMTKVLECLQQKVNGILESPTGTGKTLCLLCTTLAWREHLRDGISARKIAERAQGELFPDRALSSWGNAAAAAGDPIACYTDIPKIIYASRTHSQLTQVINELRNTSYRSRCRATLWVLETAPPRPTVLSPTRPKVCVLGSREQLCIHPEVKKQESNHLQIHLCRKKVASRSCHFYNNVEEKSLEQELASPILDIEDLVKSGSKHRVCPYYLSRNLKQQADIIFMPYNYLLDAKSRRAHNIDLKGTVVIFDEAHNVEKMCEESASFDLTPHDLASGLDVIDQVLEEQTKAAQQGEPHPEFSADSPSPGLNMELEDIAKLKMILLRLEGAIDAVELPGDDSGVTKPGSYIFELFAEAQITFQTKGCILDSLDQIIQHLAGRAGVFTNTAGLQKLADIIQIVFSVDPSEGSPGSPAGLGALQSYKVHIHPDAGHRRTAQRSDAWSTTAARKRGKVLSYWCFSPGHSMHELVRQGVRSLILTSGTLAPVSSFALEMQIPFPVCLENPHIIDKHQIWVGVVPRGPDGAQLSSAFDRRFSEECLSSLGKALGNIARVVPYGLLIFFPSYPVMEKSLEFWRARDLARKMEALKPLFVEPRSKGSFSETISAYYARVAAPGSTGATFLAVCRGKASEGLDFSDTNGRGVIVTGLPYPPRMDPRVVLKMQFLDEMKGQGGAGGQFLSGQEWYRQQASRAVNQAIGRVIRHRQDYGAVFLCDHRFAFADARAQLPSWVRPHVRVYDNFGHVIRDVAQFFRVAERTMPAPAPRATAPSVRGEDAVSEAKSPGPFFSTRKAKSLDLHVPSLKQRSSGSPAAGDPESSLCVEYEQEPVPARQRPRGLLAALEHSEQRAGSPGEEQAHSCSTLSLLSEKRPAEEPRGGRKKIRLVSHPEEPVAGAQTDRAKLFMVAVKQELSQANFATFTQALQDYKGSDDFAALAACLGPLFAEDPKKHNLLQGFYQFVRPHHKQQFEEVCIQLTGRGCGYRPEHSIPRRQRAQPVLDPTGRTAPDPKLTVSTAAAQQLDPQEHLNQGRPHLSPRPPPTGDPGSQPQWGSGVPRAGKQGQHAVSAYLADARRALGSAGCSQLLAALTAYKQDDDLDKVLAVLAALTTAKPEDFPLLHRFSMFVRPHHKQRFSQTCTDLTGRPYPGMEPPGPQEERLAVPPVLTHRAPQPGPSRSEKTGKTQSKISSFLRQRPAGTVGAGGEDAGPSQSSGPPHGPAASEWGL

SEQ ID NO: 2712 - protein, 467 aa, Homo sapiens
MEETIKDPPTSAVLLDHCHFSQVIFNSVEKFYIPGGDVTCHYTFTQHFIPRRKDWIGIFRCSLNQTIQLLITPDTGSIWHQVGWKTTREYYTFMWVTLPIDLNNKSAKQQEVQFKAYYLPKDDEYYQFCYVDEDGVVRGASIPFQFRPENEEDILVVTTQGEVEEIEQHNKELCKENQELKDSCISLQKQNSDMQAELQKKQEELETLQSINKKLELKVKEQKDYWETELLQLKEQNQKMSSENEKMGIRVDQLQAQLSTQEKEMEKLVQGDQDKTEQLEQLKKENDHLFLSLTEQRKDQKKLEQTVEQMKQNETTAMKKQQELMDENFDLSKRLSENEIICNALQRQKERLEGENDLLKRENSRLLSYMGLDFNSLPYQVPTSDEGGARQNPGLAYGNPYSGIQESSSPSPLSIKKCPICKADDICDHTLEQQQMQPLCFNCPICDKIFPATEKQIFEDHVFCHSL

SEQ ID NO: 2713 - protein, 625 aa, Homo sapiens
MSNYSVSLVGPAPWGFRLQGGKDFNMPLTISSLKDGGKAAQANVRIGDVVLSIDGINAQGMTHLEAQNKIKGCTGSLNMTLQRASAAPKPEPVPVQKPTVTSVCSETSQELAEGQRRGSQGDSKQQNGKIPPKRPPRKHIVERYTEFYHVPTHSDASKKRLIEDTEDWRPRTGTTQSRSFRILAQITGTEHLKESEADNTKKAKFDSALEDLPKSGPHPPATPQVLTIGSQVATLSKVATTYSSLSSSTGNVEDSFEGFRNFSTFSSPARYSAAVLSSAAATVSAVIATKTRLYTPERYHSLLDALCISPVSKPLAFSYLQSSRKSTGSIHVKKTSNSQEPSPQLASSVASTRSMPESLDSPTSGRPGVTSLTAAAAFKPVGSTGVIKSPSWQRPNQGVPSTGRISNSATYSGSVAPANSALGQTQPSDQDTLVQRAEHIPAGKRTPMCAHCNQVIRGPFLVALGKSWHPEEFNCAHCKNTMAYIGFVEEKGALYCELCYEKFFAPECGRCQRKILGEVISALKQTWHVSCFVCVACGKPIRNNVFHLEDGEPYCETDYYALFGTICHGCEFPIEAGDMFLEALGYTWHDTCFVCSVCCESLEGQTFFSKKDKPLCKKHAHSVNF

SEQ ID NO: 2714 - protein, 917 aa, Homo sapiens
YLCLAPDGIWDPQGPDLSNCSSPWVNHITQKLKSGETAANIARELAEQTRNHLNAGDITYSVRAMDQLVGLLDVQLRNLTPGGKDSAARSLNKAMVETVNNLLQPQALNAWRDLTTSDQLRAATMLLHTVEESAFVLADNLLKTDIVRENTDNIKLEVARLSTEGNLEDLKFPENMGHGSTIQLSANTLKQNGRNGEIRVAFVLYNNLGPYLSTENASMKLGTEALSTNHSVIVNSPVITAAINKEFSNKVYLADPVVFTVKHIKQSEENFNPNCSFWSYSKRTMTGYWSTQGCRLLTTNKTHTTCSCNHLTNFAVLMAHVEVKHSDAVHDLLLDVITWVGILLSLVCLLICIFTFCFFRGLQSDRNTIHKNLCISLFVAELLFLIGINRTDQPIACAVFAALLHFFFLAAFTWMFLEGVQLYIMLVEVFESEHSRRKYFYLVGYGMPALIVAVSAAVDYRSYGTDKVCWLRLDTYFIWSFIGPATLIIMLNVIFLGIALYKMFHHTAILKPESGCLDNIKSWVIGAIALLCLLGLTWAFGLMYINESTVIMAYLFTIFNSLQGMFIFIFHCVLQKKVRKEYGKCLRTHCCSGKSTESSIGSGKTSGSRTPGRYSTGSQSRIRRMWNDTVRKQSESSFITGDINSSASLNREGLLNNARDTSVMDTLPLNGNHGNSYSIASGEYLSNCVQIIDRGYNHNETALEKKILKELTSNYIPSYLNNHERSSEQNRNLMNKLVNNLGSGREDDAIVLDDATSFNHEESLGLELIHEESDAPLLPPRVYSTENHQPHHYTRRRIPQDHSESFFPLLTNEHTEDLQSPHRDSLYTSMPTLAGVAATESVTTSTQTEPPPAKCGDAEDVYYKSMPNLGSRNHVHQLHTYYQLGRGSSDGFIVPPNKDGTPPEGSSKGPAHLVTSL

SEQ ID NO: 2715 - protein, 791 aa, Homo sapiens
MDGESEVDFSSNSITPLWRRRSIPQPHQVLGRSKPRPQSYQSPNGLLITDFPVEDGGTLLAAQIPAQVPTASDSRTVHRSPLLLGAQRRAVANGGTASPEYRAASPRLRRPKSPKLPKAVPGGSPKSPANGAVTLPAPPPPPVLRPPRTPNAPAPCTPEEDLTGLTASPVPSPTANGLAANNDSPGSGSQSGRKAKDPERGLFPGPQKSSSEQKLPLQRLPSQENELLENPSVVLSTNSPAALKVGKQQIIPKSLASEIKISKSNNQNVEPHKRLLKVRSMVEGLGGPLGHAGEESEVDNDVDSPGSLRRGLRSTSYRRAVVSGFDFDSPTSSKKKNRMSQPVLKVVMEDKEKFSSLGRIKKKMLKGQGTFDGEENAVLYQNYKEKALDIDSDEESEPKEQKSDEKIVIHHKPLRSTWSQLSAVKRKGLSQTVSQEERKRQEAIFEVISSEHSYLLSLEILIRMFKNSKELSDTMTKTERHHLFSNITDVCEASKKFFIELEARHQNNIFIDDISDIVEKHTASTFDPYVKYCTNEVYQQRTLQKLLATNPSFKEVLSRIESHEDCRNLPMISFLILPMQRVTRLPLLMDTICQKTPKDSPKYEVCKRALKEVSKLVRLCNEGARKMERTEMMYTINSQLEFKIKPFPLVSSSRWLVKRGELTAYVEDTVLFSRRTSKQQVYFFLFNDVLIITKKKSEESYNVNDYSLRDQLLVESCDNEELNSSPGKNSSTMLYSRQSSASHLFTLTVLSNHANEKVEMLLGAETQSERARWITALGHSSGKPPADRTCG

SEQ ID NO: 2716 - protein, 514 aa, Homo sapiens
MYTPNAQYCQMRCTFHPRCLLFSFLPASSINDMEKRFGCFLKDSVTGTLPKVHRTGAVSGHSLKQCGHQISACHRDIYKGVDMRGVNFNVSKVSSVEECQKRCTSNIRCQFFSYATQTFHKAEYRNNCLLKYSPGGTPTAIKVLSNVESGFSLKPCALSEIGCHMNIFQHLAFSDVDVARVLTPDAFVCRTICTYHPNCLFFTFYTNVWKIESQRNVCLLKTSESGTPSSSTPQENTISGYSLLTCKRTLPEPCHSKIYPGVDFGGEELNVTFVKGVNVCQETCTKMIRCQFFTYSLLPEDCKEEKCKCFLRLSMDGSPTRIAYGTQGSSGYSLRLCNTGDNSVCTTKTSTRIVGGTNSSWGEWPWQVSLQVKLTAQRHLCGGSLIGHQWVLTAAHCFDGLPLQDVWRIYSGILNLSDITKDTPFSQIKEIIIHQNYKVSEGNHDIALIKLQAPLNYTEFQKPICLPSKGDTSTIYTNCWVTGWGFSKEKGRFRWSLSLQTQWNVAFGGHHQLG

SEQ ID NO: 2717 - protein, 1034 aa, Homo sapiens
MDECGSRIRRRVSLPKRNRPSLGCIFGAPTAAELVPGDEGKEEEEMVAENRRRKTAGVLPVEVQPLLLSDSPECLVLGGGDTNPDLLRHMPTDRGVGDQPNDSEVDMFGDYDSFTENSFIAQVDDLEQKYMQLPEHKKHATDFATENLCSESIKNKLSITTIGNLTELQTDKHTENQSGYEGVTIEPGADLLYDVPSSQAIYFENLQNSSNDLGDHSMKERDWKSSSHNTVNEELPHNCIEQPQQNDESSSKVRTSSDMNRRKSIKDHLKNAMTGNAKAQTPIFSRSKQLKDTLLSEEINVAKKTVESSSNDLGPFYSLPSKVRDLYAQFKGIEKLYEWQHTCLTLNSVQERKNLIYSLPTSGGKTLVAEILMLQELLCCRKDVLMILPYVAIVQEKLHMIGEGSRGATLEMTLAKILYTSKTTQIIGMSATLNNVEDLQKFLQAEYYTSQFRPVELKEYLKINDTIYEVDSKAENGMTFSRLLNYKYSDTLKKMDPDHLVALVTEVIPNYSCLVFCPSKKNCENVAEMICKFLSKEYLKHKEKEKCEVIKNLKNIGNGNLCPVLKRTIPFGVAYHHSGLTSDERKLLEEAYSTGVLCLFTCTSTLAAGVNLPARRVILRAPYVAKEFLKRNQYKQMIGRAGRAGIDTIGESILILQEKDKQQVLELITKPLENCYSHLVQEFTKGIQTLFLSLIGLKIATNLDDIYHFMNGTFFGVQQKVLLKEKSLWEITVESLRYLTEKGLLQKDTIYKSEEEVQYNFHITKLGRASFKGTIDLAYCDILYRDLKKGLEGLVLESLLHLIYLTTPYDLVSQCNPDWMIYFRQFSQLSPAEQNVAAILGVSESFIGKKASGQAIGKKVDKNVVNRLYLSFVLYTLLKETNIWTVSEKFNMPRGYIQNLLTGTASFSSCVLHFCEELEEFWVYRALLVELTKKLTYCVKAELIPLMEVTGVLEGRAKQLYSAGYKSLMHLANANPEVLVRTIDHLSRRQAKQIVSSAKMLLHEKAEALQEEVEELLRLPSDFPGAVASSTDKA

SEQ ID NO: 2718 - protein, 279 aa, Homo sapiens
RYTDIILYASGSLALAVLLLLAGLYRGQALHGRHPRPPATVQKLSRFPLARQSGSSGKSSSSLVRGVRLSSSGPALLAGLVSLDLPLDPLWEFPRDRLVLGKPLGEGCFGQVVRAEAFGMDPARPDQASTVAVKMLKDNASDKDLADLVSEMEVMKLIGRHKNIINLLGVCTQEGPLYVIVECAAKGNLREFLRARRPPGPDLSPDGPRSSEGPLSFPVLVSCAYQVARGMQYLESRKCIHRDLAARNVLVTEDNVMKIADFGLARGVHHIDYYKKTSN

SEQ ID NO: 2719 - protein, 232 aa, Homo sapiens
MPGWFKKAWYGLASLLSFSSFILIIVALVVPHWLSGKILCQTGVDLVNATDRELVKFIGDIYYGLFRGCKVRQCGLGGRQSQFTIFPHLVKELNAGLHVMILLLLFLALALALVSMGFAILNMIQVPYRAVSGPGGICLWNVLAGGVVALAIASFVAAVKFHDLTERIANFQEKLFQFVVVEEQYEESFWICVASASAHAANLVVVAISQIPLPEIKTKIEEATVTAEDILY

SEQ ID NO: 2720 - protein, 113 aa, Homo sapiens
MSQPRTPEQALDTPGDCPPGRRDEDAGEGIQCSQRMLSFSDALLSIIATVMILPVTHTEISPEQFDRSVQRLLATRIAVYLMTFLIVTVAWAAHTRLFQVVGKTDDTLALLNL

SEQ ID NO: 2721 - protein, 837 aa, Homo sapiens
MTGRKASGGTPCTLRKGAPIITLGKNWTERLAAGDSVGCSGARCHRPLSRQLCASQRSMRTLEDSSGTVLHRLIQEQLRYGNLTETRTLLAIQQQALRGGAGTGGTGSPQASLEILAPEDSQVLQQATRQEPQGQEHQGGENHLAENTLYRLCPQPSKGEELPTYEEAKAHSQYYAAQQAGTRPHAGDRDPRGAPGGSRRQDEALRELRHGHVRSLSERLLQLSLERNGARAPSHMSSSHSFPQLARNQQGPPLRGPPAEGPESRGPPPQYPHVVLAHETTTAVTDPRYRARGSPHFQHAEVRILQAQVPPVFLQQQQQYQYLQQSQEHPPPPHPAALGHGPLSSLSPPAVEGPVSAQASSATSGSAHLAQMEAVLRENARLQRDNERLQRELESSAEKAGRIEKLESEIQRLSEAHESLTRASSKREALEKTMRNKMDSEMRRLQDFNRDLRERLESANRRLASKTQEAQAGSQDMVAKLLAQSYEQQQEQEKLEREMALLRGAIEDQRRRAELLEQALGNAQGRAARAEEELRKKQAYVEKVERLQQALGQLQAACEKREQLELRLRTRLEQELKALRAQQRQAGAPGGSSGSGGSPELSALRLSEQLREKEEQILALEADMTKWEQKYLEERAMRQFAMDAAATAAAQRDTTLIRHSPQPSPSSSFNEGLLTGGHRHQEMESRLKVLHAQILEKDAVIKVLQQRSRRDPGKAIQGSLRPAKSVPSVFAAAAAGTQGWQGLSSSERQTADAPARLTTDRAPTEEPVVTAPPAAHAKHGSRDGSTQTEGPPDSTSTCLPPEPDSLLGCSSSQRAASLDSVATSRVQDLSDMVEILI

SEQ ID NO: 2722 - protein, 190 aa, Homo sapiens
MAGTARHDREMAIQAKKKLTTATDPIERLRLQCLARGSAGIKGLGRVFRIMDDDNNRTLDFKEFMKGLNDYAVVMEKEEVEELFRRFDKDGNGTIDFNEFLLTLRPPMSRARKEVIMQAFRKLDKTGDGVITIEDLREVYNAKHHPKYQNGEWSEEQVFRKFLDNFDSPYDKDGLVTPEEFMNYYAGVSA

SEQ ID NO: 2723 - protein, 618 aa, Homo sapiens
MAGSGPRPRSWGRREAGARDEAAAAGGRGPGPCRCSQGRRAWIAPGKPAMPAAWTPFMAAEEMHWPVPMKAIGAQNLLTMPGGVAKAGYLHKKGGTQLQLLKWPLRFVIIHKRCVYYFKSSTSASPQGAFSLSGYNRVMRAAEETTSNNVFPFKIIHISKKHRTWFFSASSEEERKSWMALLRREIGHFHEKKDLPLDTSDSSSDTDSFYGAVERPVDISLSPYPTDNEDYEHDDEDDSYLEPDSPEPGRLEDALMHPPAYPPPPVPTPRKPAFSDMPRAHSFTSKGPGPLLPPPPPKHGLPDVGLAAEDSKRDPLCPRRAEPCPRVPATPRRMSDPPLSTMPTAPGLRKPPCFRESASPSPEPWTPGHGACSTSSAAIMATATSRNCDKLKSFHLSPRGPPTSEPPPVPANKPKFLKIAEEDPPREAAMPGLFVPPVAPRPPALKLPVPEAMARPAVLPRPEKPQLPHLQRSPPDGQSFRSFSFEKPRQPSQADTGGDDSDEDYEKVPLPNSVFVNTTESCEVERLFKATSPRGEPQDGLYCIRNSSTKSGKVLVVWDETSNKVRNYRIFEKDSKFYLEGEVLFVSVGSMVEHYHTHVLPSHQSLLLRHPYGYTGPR

SEQ ID NO: 2724 - protein, 194 aa, Homo sapiens
VPCAPAPRCWRSWPRSWPRPRWPRPRPRTWCMWTRPARCGPCGASGGAQASAPRCHTARLTSTSSAGTSSSTSPMWAPSLTAASSRGSTGRGLSYNFTHLDGYLDLLRENQLLPGFELMGSASGHFTDFEDKQQVFEWKDLVSSLARRYIGRYGLAHVSKWNFETWNEPDHHDFDNVSMTMQGFLNYYDACSEG

SEQ ID NO: 2725 - protein, 201 aa, Homo sapiens
MRLLLALLGVLLSVPGPPVLSLEASEEVELEPCLAPSLEQQEQELTVALGQPVRLCCGRAERGGHWYKEGSRLAPAGRVRGWRGRLEIASFLPEDAGRYLCLARGSMIVLQNLTLITGDSLTSSNDDEDPKSHRDPSNRHSYPQQAPYWTHPQRMEKKLHAVPAGNTVKFRCPAAGNPTPTIRWLKDGQAFHGENRIGGIR

SEQ ID NO: 2726 - protein, 443 aa, Homo sapiens
NQYPPPMLEDACRLINLGGENIQNDGFQFVTELQEDFLGGNGFIGQELNSGRESPFVKTEDNGSDYLVYLPSQMFEPQKLMINYEKDQKSAEIASLTSGHENYGRKEEPDHTYEPGDVSLQEYYMDVAFLIDASQRVGSDEFKEVKAFITSVLDYFHIAPTPLTSTLGDRVAVLSYSPPGYMPNTEECPVYLEFDLVTYNSIHQMKHHLQDSQQLNGDVFIGHALQWTIDNVFVGTPNLRKNKVIFVISAGETNSLDKDVLRNVSLRAKCQGYSIFVFSFGPKHNDKELEELASHPLDHHLVQLGRTHKPDWNYIIKFVKPFVHLIRRAINKYPTEDMKATCVNMTSPNPENGGTENTVLLLPGIYEIKTENGDLFDEFDSQAQHLLVLGNNHSSGSETATDLMQKLYLLFSTEKLAMKDKEKAHLEEISALVVDKQQEKEDL

SEQ ID NO: 2727 - protein, 503 aa, Homo sapiens
LGSFFTEYLQNQLLTKGMVILRDKIRFYEELQRDKAAAAAVLGAVRKRPSVVPMAGQDPALSTSHPFYDVARHGILQVAGDDRFGRRVVTFSCCRMPPSHELDHQRLLEYLKYTLDQYVENDYTIVYFHYGLNSRNKPSLGWLQSAYKEFDRKYKKNLKALYVVHPTSFIKVLWNILKPLISHKFGKKVIYFNYLSELHEHLKYDQLVIPPEVLRYDEKLQSLHEGRTPPPTKTPPPRPPLPTQQFGVSLQYLKDKNQGELIPPVLRFTVTYLREKGLRTEGLFRRSASVQTVREIQRLYNQGKPVNFDDYGDIHIPAVILKTFLRELPQPLLTFQAYEQILGITSLPLAPLELSREPHALPGVESSLRVTGCRQILRSLPEHNYVVLRYLMGFLHAVSRESIFNKMNSSNLACVFGLNLIWPSQGVSSLSALVPLNMFTELLIEYYEKIFSTPEAPGEHGLAPWEQGSRAAPLQEAVPRTQATGLTKPTLPPSPLMAARRRL

SEQ ID NO: 2728 - protein, 1299 aa, Homo sapiens
MWPSQLLIFMMLLAPIIHGGKHSERHPALAAPLRHAERSPGGALPPRHLLQQPAAERTAAHRGQGPRGATRGVRGPGAQGAQIAAQAFSRAPIPMAVVRRELSCESYPIELRCPGTDVIMIESANYGRTDDKICDSDPAQMENIRCYLPDAYKIMSQRCNNRTQCAVVAGPDVFPDPCPGTYKYLEVQYECVPYKVEQKVFLCPGLLKGVYQSEHLFESDHQSGAWCKDPLQASDKIYYMPWTPYRTDTLTEYSSKDDFIAGRPTTTYKLPHRVDGTGFVVYDGALFFNKERTRNIVKFDLRTRIKSGEAIIANANYHDTSPYRWGGKSDIDLAVDENGLWVIYATEQNNGKIVISQLNPYTLRIEGTWDTAYDKRSASNAFMICGILYVVKSVYEDDDNEATGNKIDYIYNTDQSKDSLVDVPFPNSYQYIAAVDYNPRDNLLYVWNNYHVVKYSLDFGPLDSRSGQAHHGQVSYISPPIHLDSELERPSVKDISTTGPLGMGSTTTSTTLRTTTLSPGRSTTPSVSGRRNRSTSTPSPAVEVLDDMTTHLPSASSQIPALEESCEAVEAREIMWFKTRQGQIAKQPCPAGTIGVSTYLCLAPDGIWDPQGPDLSNCSSPWVNHITQKLKSGETAANIARELAEQTRNHLNAGDITYSVRAMDQLVGLLDVQLRNLTPGGKDSAARSLNKLQKRERSCRAYVQAMVETVNNLLQPQALNAWRDLTTSDQLRAATMLLHTVEESAFVLADNLLKTDIVRENTDNIKLEVARLSTEGNLEDLKFPENMGHGSTIQLSANTLKQNGRNGEIRVAFVLYNNLGPYLSTENASMKLGTEALSTNHSVIVNSPVITAAINKEFSNKVYLADPVVFTVKHIKQSEENFNPNCSFWSYSKRTMTGYWSTQGCRLLTTNKTHTTCSCNHLTNFAVLMAHVEVKHSDAVHDLLLDVITWVGILLSLVCLLICIFTFCFFRGLQSDRNTIHKNLCISLFVAELLFLIGINRTDQPIACAVFAALLHFFFLAAFTWMFLEGVQLYIMLVEVFESEHSRRKYFYLVGYGMPALIVAVSAAVDYRSYGTDKVCWLRLDTYFIWSFIGPATLIIMLNVIFLGIALYKMFHHTAILKPESGCLDNIKSWVIGAIALLCLLGLTWAFGLMYINESTVIMAYLFTIFNSLQGMFIFIFHCVLQKKVRKEYGKCLRTHCCSGKSTESSIGSGKTSGSRTPGRYSTGSQSRIRRMWNDTVRKQSESSFITGDINSSASLNREPYRETSMGVKLNIAYQIGASEQCQGYKCHGYSTTEW

SEQ ID NO: 2729 - protein, 1143 aa, Homo sapiens
MPRRAGSGQLPLPRGWEEARDYDGKVFYIDHNTRRTSWIDPRDRLTKPLSFADCVGDELPWGWEAGFDPQIGVYYIDHINKTTQIEDPRKQWRGEQEKMLKDYLSVAQDALRTQKELYHVKEQRLALALDEYVRLNDAYKEKSSSHTSLFSGSSSSTKYDPDILKAEISTTRLRVKKLKRELSQMKQELLYKEQGFETLQQIDKKMSGGQSGYELSEAKAILTELKSIRKAISSGEKEKQDLMQSLAKLQERFHLDQNIGRSEPDLRCSPVNSHLCLSRQTLDAGSQTSISGDIGVRSRSNLAEKVRLSLQYEEAKRSMANLKIELSKLDSEAWPGALDIEKEKLMLINEKEELLKELQFVTPQKRTQDELERLEAERQRLEEELLSVRGTPSRALAERLRLEERRKELLQKLEETTKLTTYLHSQLKSLSASTLSMSSGSSLGSLASSRGSLNTSSRGSLNSLSSTELYYSSQSDQIDVDYQYKLDFLLQEKSGYIPSGPITTIHENEVVKSPSQPGQSGLCGVAAAATGHTPPLAEAPKSVASLSSRSSLSSLSPPGSPLVLEGTFPMSSSHDASLHQFTADFEDYVEKSLPKRRVIHLLGEKTTCVSAAVSDESVAGDSGVYEAFVKQPSEMEDVTYSEEDVAIVETAQVQIGLRYNAKSSSFMVIIAQLRNLHAFLIPHTSKVYFRVAVLPSSTDVSCLFRTKVHPPTESILFNDVFRVAISQTALQQKTLRVDLCSVSKHRREECLAGTQISLADLPFSSEVFTLWYNLLPSKQMPCKKNEENEDSVFQPNQPLVDSIDLDAVSALLARTSAELLAVEQELAQEEEEESGQEEPRGPDGDWLTMLREASDEIVAEKEAEVKLPEDSSCTEDLSSCTSVPEMNEDGNRKESNCAKDLRSQPPTRIPTLVDKETNTDEAANDNMAVRPKERSSLSSRQHPFVRSSVIVRSQTFSPGERNQYICRLNRSDSDSSTLAKKSLFVRNSTERRSLRVKRTVCQSVLRRTTQECPVRTSLDLELDLQASLTRQSRLNDELQALRDLRQKLEELKAQGETDLPPGVLEDERFQRLLKQAEKQAEQSKEEQKQGLNAEKLMRQVSKDVCRLREQSQKVPRQVQSFREKIAYFTRAKISIPSLPADDV

SEQ ID NO: 2730 - protein, 179 aa, Homo sapiens
MSQPRTPEQALDTPGDCPPGRRDEDAGEGIQCSQRMLSFSDALLSIIATVMQFDRSVQRLLATRIAVYLMTFLIVTVAWAAHTRLFQVVGKTDDTLALLNLACMMTITFLPYTFSLMVTFPDVPLGIFLFCVCVIAIGVVQALIVGYAFHFPHLLSPQIQRSAHRALYRRHVLGIVLQG

SEQ ID NO: 2731 - protein, 1274 aa, Homo sapiens
MWPSQLLIFMMLLAPIIHAFSRAPIPMAVVRRELSCESYPIELRCPGTDVIMIESANYGRTDDKICDSDPAQMENIRCYLPDAYKIMSQRCNNRTQCAVVAGPDVFPDPCPGTYKYLEVQYECVPYKVEQKVFLCPGLLKGVYQSEHLFESDHQSGAWCKDPLQASDKIYYMPWTPYRTDTLTEYSSKDDFIAGRPTTTYKLPHRVDGTGFVVYDGALFFNKERTRNIVKFDLRTRIKSGEAIIANANYHDTSPYRWGGKSDIDLAVDENGLWVIYATEQNNGKIVISQLNPYTLRIEGTWDTAYDKRSASNAFMICGILYVVKSVYEDDDNEATGNKIDYIYNTDQSKDSLVDVPFPNSYQYIAAVDYNPRDNLLYVWNNYHVVKYSLDFGPLDSRSGQAHHGQVSYISPPIHLDSELERPSVKDISTTGPLGMGSTTTSTTLRTTTLSPGRSTTPSVSGRRNRSTSTPSPAVEVLDDMTTHLPSASSQIPALEESCEAVEAREIMWFKTRQGQIAKQPCPAGTIGVSTYLCLAPDGIWDPQGPDLSNCSSPWVNHITQKLKSGETAANIARELAEQTRNHLNAGDITYSVRAMDQLVGLLDVQLRNLTPGGKDSAARSLNKLQKRERSCRAYVQAMVETVNNLLQPQALNAWRDLTTSDQLRAATMLLHTVEESAFVLADNLLKTDIVRENTDNIKLEVARLSTEGNLEDLKFPENMGHGSTIQLSANTLKQNGRNGEIRVAFVLYNNLGPYLSTENASMKLGTEALSTNHSVIVNSPVITAAINKEFSNKVYLADPVVFTVKHIKQSEENFNPNCSFWSYSKRTMTGYWSTQGCRLLTTNKTHTTCSCNHLTNFAVLMAHVEVKHSDAVHDLLLDVITWVGILLSLVCLLICIFTFCFFRGLQSDRNTIHKNLCISLFVAELLFLIGINRTDQPIACAVFAALLHFFFLAAFTWMFLEGVQLYIMLVEVFESEHSRRKYFYLVGYGMPALIVAVSAAVDYRSYGTDKVCWLRLDTYFIWSFIGPATLIIMLNVIFLGIALYKMFHHTAILKPESGCLDNIKSWVIGAIALLCLLGLTWAFGLMYINESTVIMAYLFTIFNSLQGMFIFIFHCVLQKKVRKEYGKCLRTHCCSGKSTESSIGSGKTSGSRTPGRYSTGSQSRIRRMWNDTVRKQSESSFITGDINSSASLNRGAMANHLISNALLRPHGTNNPYNTLLGEPAVCNNPSVSMYNAQEPYRETSMGVKLNIAYQIGASEQCQGYKCHGYSTTEW

SEQ ID NO: 2732 - protein, 44 aa, Homo sapiens
MEADIITNLRCRLKEAEEERLKAAQVMNKKNIPFKEKLNSRVEC

SEQ ID NO: 2733 - protein, 118 aa, Homo sapiens
MFPPSGSTGLIPPSHFQARPLSTLPRMAPTWLSDIPLVQPPGHQDVSERRLDTQRPQVTMWERDVSSDRQEPGRRGRSWGLEGSQALSQQAEVIVRQLQELRRLEEEVRLLRETSLQQ

SEQ ID NO: 2734 - protein, 2023 aa, Homo sapiens
MIQEEQIQLEGSLVDGPEASLMEQDRTNHVEGNRLSPFLIPSPPICQTEPLATKLQNGSPLPERAHPEVNGDTKWHSFKSYYGIPCMKGSQNSRVSPDFTQESRGYSKCLQNGGIKRTVSEPSLSGLLQIKKLKQDQKANGERRNFGVSQERNPGESSQPNVSDLSDKKESVSSVAQENAVKDFTSFSTHNCSGPENPELQILNEQEGKSANYHDKNIVLLKNKAVLMPNGATVSASSVEHTHGELLEKTLSQYYPDCVSIAVQKTTSHINAINSQATNELSCEITHPSHTSGQINSAQTSNSELPPKPAAVVSEACDADDADNASKLAAMLNTCSFQKPEQLQQQKSVFEICPSPAENNIQGTTKLASGEEFCSGSSSNLQAPGGSSERYLKQNEMNGAYFKQSSVFTKDSFSATTTPPPPSQLLLSPPPPLPQVPQLPSEGKSTLNGGVLEEHHHYPNQSNTTLLREVKIEGKPEAPPSQSPNPSTHVCSPSPMLSERPQNNCVNRNDIQTAGTMTVPLCSEKTRPMSEHLKHNPPIFGSSGELQDNCQQLMRNKEQEILKGRDKEQTRDLVPPTQHYLKPGWIELKAPRFHQAESHLKRNEASLPSILQYQPNLSNQMTSKQYTGNSNMPGGLPRQAYTQKTTQLEHKSQMYQVEMNQGQSQGTVDQHLQFQKPSHQVHFSKTDHLPKAHVQSLCGTRFHFQQRADSQTEKLMSPVLKQHLNQQASETEPFSNSHLLQHKPHKQAAQTQPSQSSHLPQNQQQQQKLQIKNKEEILQTFPHPQSNNDQQREGSFFGQTKVEECFHGENQYSKSSEFETHNVQMGLEEVQNINRRNSPYSQTMKSSACKIQVSCSNNTHLVSENKEQTTHPELFAGNKTQNLHHMQYFPNNVIPKQDLLHRCFQEQEQKSQQASVLQGYKNRNQDMSGQQAAQLAQQRYLIHNHANVFPVPDQGGSHTQTPPQKDTQKHAALRWHLLQKQEQQQTQQPQTESCHSQMHRPIKVEPGCKPHACMHTAPPENKTWKKVTKQENPPASCDNVQQKSIIETMEQHLKQFHAKSLFDHKALTLKSQKQVKVEMSGPVTVLTRQTTAAELDSHTPALEQQTTSSEKTPTKRTAASVLNNFIESPSKLLDTPIKNLLDTPVKTQYDFPSCRCVEQIIEKDEGPFYTHLGAGPNVAAIREIMEERFGQKGKAIRIERVIYTGKEGKSSQGCPIAKWVVRRSSSEEKLLCLVRERAGHTCEAAVIVILILVWEGIPLSLADKLYSELTETLRKYGTLTNRRCALNEERTCACQGLDPETCGASFSFGCSWSMYYNGCKFARSKIPRKFKLLGDDPKEEEKLESHLQNLSTLMAPTYKKLAPDAYNNQIEYEHRAPECRLGLKEGRPFSGVTACLDFCAHAHRDLHNMQNGSTLVCTLTREDNREFGGKPEDEQLHVLPLYKVSDVDEFGSVEAQEEKKRSGAIQVLSSFRRKVRMLAEPVKTCRQRKLEAKKAAAEKLSSLENSSNKNEKEKSAPSRTKQTENASQAKQLAELLRLSGPVMQQSQQPQPLQKQPPQPQQQQRPQQQQPHHPQTESVNSYSASGSTNPYMRRPNPVSPYPNSSHTSDIYGSTSPMNFYSTSSQAAGSYLNSSNPMNPYPGLLNQNTQYPSYQCNGNLSVDNCSPYLGSYSPQSQPMDLYRYPSQDPLSKLSLPPIHTLYQPRFGNSQSFTSKYLGYGNQNMQGDGFSSCTIRPNVHHVGKLPPYPTHEMDGHFMGATSRLPPNLSNPNMDYKNGEHHSPSHIIHNYSAAPGMFNSSLHALHLQNKENDMLSHTANGLSKMLPALNHDRTACVQGGLHKLSDANGQEKQPLALVQGVASGAEDNDEVWSDSEQSFLDPDIGGVAVAPTHGSILIECAKRELHATTPLKNPNRNHPTRISLVFYQHKSMNEPKHGLALWEAKMAEKAREKEEECEKYGPDYVPQKSHGKKVKREPAEPHETSEPTYLRFIKSLAERTMSVTTDSTVTTSPYAFTRVTGPYNRYI

SEQ ID NO: 2735 - protein, 777 aa, Homo sapiens
MRTLEDSSGTVLHRLIQEQLRYGNLTETRTLLAIQQQALRGGAGTGGTGSPQASLEILAPEDSQVLQQATRQEPQGQEHQGGENHLAENTLYRLCPQPSKGEELPTYEEAKAHSQYYAAQQAGTRPHAGDRDPRGAPGGSRRQDEALRELRHGHVRSLSERLLQLSLERNGARAPSHMSSSHSFPQLARNQQGPPLRGPPAEGPESRGPPPQYPHVVLAHETTTAVTDPRYRARGSPHFQHAEVRILQAQVPPVFLQQQQQYQYLQQSQEHPPPPHPAALGHGPLSSLSPPAVEGPVSAQASSATSGSAHLAQMEAVLRENARLQRDNERLQRELESSAEKAGRIEKLESEIQRLSEAHESLTRASSKREALEKTMRNKMDSEMRRLQDFNRDLRERLESANRRLASKTQEAQAGSQDMVAKLLAQSYEQQQEQEKLEREMALLRGAIEDQRRRAELLEQALGNAQGRAARAEEELRKKQAYVEKVERLQQALGQLQAACEKREQLELRLRTRLEQELKALRAQQAGAPGGSSGSGGSPELSALRLSEQLREKEEQILALEADMTKWEQKYLEERAMRQFAMDAAATAAAQRDTTLIRHSPQPSPSSSFNEGLLTGGHRHQEMESRLKVLHAQILEKDAVIKVLQQRSRRDPGKAIQGSLRPAKSVPSVFAAAAAGTQGWQGLSSSERQTADAPARLTTDRAPTEEPVVTAPPAAHAKHGSRDGSTQTEGPPDSTSTCLPPEPDSLLGCSSSQRAASLDSVATSRVQDLSDMVEILI

SEQ ID NO: 2736 - protein, 611 aa, Homo sapiens
MGKSEGPVGMVESAGRAGQKRPGFLEGGLLLLLLLVTAALVALGVLYADRRGKQLPRLASRLCFLQEERTFVKRKPRGIPEAQEVSEVCTTPGCVIAAARILQNMDPTTEPCDDFYQFACGGWLRRHVIPETNSRYSIFDVLRDELEVILKAVLENSTAKDRPAVEKARTLYRSCMNQSVIEKRGSQPLLDILEVVGGWPVAMDRWNETVGLEWELERQLALMNSQFNRRVLIDLFIWNDDQNSSRHIIYIDQPTLGMPSREYYFNGGSNRKVREAYLQFMVSVATLLREDANLPRDSCLVQEDMVQVLELETQLAKATVPQEERHDVIALYHRMGLEELQSQFGLKGFNWTLFIQTVLSSVKIKLLPDEEVVVYGIPYLQNLENIIDTYSARTIQNYLVWRLVLDRIGSLSQRFKDTRVNYRKALFGTMVEEVRWRECVGYVNSNMENAVGSLYVREAFPGDSKSMVRELIDKVRTVFVETLDELGWMDEESKKKAQEKAMSIREQIGHPDYILEEMNRRLDEEYSNLNFSEDLYFENSLQNLKVGAQRSLRKLREKVDPNLWIIGAAVVNAFYSPNRNQIAYSLSRPWGQYSLPGSSSPPSSARSSHRP

SEQ ID NO: 2737 - protein, 1154 aa, Homo sapiens
GDEVVSINGNPCADLTYPEVIKLMESITDSLQMLIKRPSSGISEALISENENKNLEHLTHGGYVESTTLQIRPATKTQCTEFFLAPVKTEVPLAENQRSGPDCAGSLKEETGPSYQRAPQMPDSQRGRVAEELILREKVEAVQPGPVVELQLSLSQERHKGASGPLVALPGAEKSKSPDPDPNLSHDRIVHINSIPTNEKADPFLRSSKIIQISSGRELRVIQESEAGDAGLPRVEVILDCSDRQKTEGCRLQAGKECVDSPVEGGQSEAPPSLVSFAVSSEGTEQGEDPRSEKDHSRPHKHRARHARLRRSESLSEKQVKEAKSKCKSIALLLTDAPNPNSKGVLMFKKRRRRARKYTLVSYGTGELEREADEEEEGDKEDTCEVAFLGASESEVDEELLSDVDDNTQVVNFDWDSGLVDIEKKLNRGDKMEMLPDTTGKGALMFAKRRERMDQITAQKEEDKVGGTPSREQDAAQTDGLRTTTSYQRKEEESVRTQSSVSKSYIEVSHGLGHVPQQNGFSGTSETANIQRMVPMNRTAKPFPGSVNQPATPFSPTRNMTSPIADFPAPPPYSAVTPPPDAFSRGVSSPIAGPAQPPPWPQPAPWSQPAFYDSSERIASRDERISVPAKRTGILQEAKRRSTTKPMFTFKEPKVSPNPELLSLLQNSEGKRGTGAGGDSGPEEDYLSLGAEACNFMQSSSAKQKTPPPVAPKPAVKSSSSQPVTPVSPVWSPGVAPTQPPAFPTSNPSKGTVVSSIKIAQPSYPPARPASTLNVAGPFKGPQAAVASQNYTPKPTVSTPTVNAVQPGAVGPSNELPGMSGRGAQLFAKRQSRMEKYVVDSDTVQAHAARAQSPTPSLPASWKYSSNVRAPPPVAYNPIHSPSYPLAALKSQPSAAQPSKMGKKKGKKPLNALDVMKHQPYQLNASLFTFQPPDAKDGLPQKSSVKVNSALAMKQALPPRPVNAASPTNVQASSVYSESGRSLSLPGRSVPPPISTSPWVYQPTYSYSSKPTDGLEKANKRPTPWEAAAKSPLGLVDDAFQPRNIQESIVANVVSAARRKVLPGPPEDWNERLSYIPQTQKAYMGSCGRQEYNVTANNNMSTTSQYGSQLPYAYYRQASRNDSAIMSMETRSDYCLPVADYNYNPHPRGWRRQT

SEQ ID NO: 2738 - protein, 316 aa, Homo sapiens
VFLCDHRFAFADARAQLPSWVRPHVRVYDNFGHVIRDVAQFFRVAERTMPAPAPRATAPSVRGEDAVSEAKSPGPFFSTRKAKSLDLHVPSLKQRSSGSPAAGDPESSLCVEYEQEPVPARQRPRGLLAALEHSEQRAGSPGEEQAHSCSTLSLLSEKRPAEEPRGGRKKIRLVSHPEEPVAGAQTDRAKLFMVAVKQELSQANFATFTQALQDYKGSDDFAALAACLGPLFAEDPKKHNLLQGFYQFVRPHHKQQFEEVCIQLTGRGCGYRPEHSIPRRQRAQPVLDPTGNFPDALDQLCGSTSLHQEERRRIPS

SEQ ID NO: 2739 - protein, 139 aa, Homo sapiens
MFPPSGSTGLIPPSHFQARPLSTLPRMAPTWLSDIPLVQPPGHQDVSERRLDTQRPQVTMWERDVSSDRQEPGRRGRSWGLEGSQALSQQAEVIVRQLQELRRLEEEVRLLRETSLQQKMRLEAQAMELEALARAEKAG

SEQ ID NO: 2740 - protein, 140 aa, Homo sapiens
MAPTWLSDIPLVQPPGHQDVSERRLDTQRPQVTMWERDVSSDRQEPGRRGRSWGLEGSQALSQQAEVIVRQLQELRRLEEEVRLLRETSLQQKMRLEAQAMELEALARAEKAGRAEAEGLRAALAGAEVVRKNLEEGSQR

SEQ ID NO: 2741 - protein, 133 aa, Homo sapiens
MSQPRTPEQALDTPGDCPPGRRDEDAGEGIQCSQRMLSFSDALLSIIATVMILPVTHTEISPEQQFDRSVQRLLATRIAVYLMTFLIVTVAWAAHTRLFQVVGKTDDTLALLNLACMMTITFLPYTFSLMVTF

SEQ ID NO: 2742 - protein, 1084 aa, Homo sapiens
IYYKVIKDIEPGEELLVHVKEGVYPLGTVPPGLDEEPTFRCDECDELFQSKLDLRRHKKYTCGSVGAALYEGLAEELKPEGLGGGSGQAHECKDCERMFPNKYSLEQHMVIHTEEREYKCDQCPKAFNWKSNLIRHQMSHDSGKRFECENCVKVFTDPSNLQRHIRSQHVGARAHACPDCGKTFATSSGLKQHKHIHSTVKPFICEVCHKSYTQFSNLCRHKRMHADCRTQIKCKDCGQMFSTTSSLNKHRRFCEGKNHYTPGGIFAPGLPLTPSPMMDKAKPSPSLNHASLGFNEYFPSRPHPGSLPFSTAPPTFPALTPGFPGIFPPSLYPRPPLLPPTSLLKSPLNHTQDAKLPSPLGNPALPLVSAVSNSSQGTTAAAGPEEKFESRLEDSCVEKLKTRSSDMSDGSDFEDVNTTTGTDLDTTTGTGSDLDSDVDSDPDKDKGKGKSAEGQPKFGGGLAPPGAPNSVAEVPVFYSQHSFFPPPDEQLLTATGAAGDSIKAIASIAEKYFGPGFMGMQEKKLGSLPYHSAFPFQFLPNFPHSLYPFTDRALAHNLLVKAEPKSPRDALKVGGPSAECPFDLTTKPKDVKPILPMPKGPSAPASGEEQPLDLSIGSRARASQNGGGREPRKNHVYGERKLGAGEGLPQVCPARMPQQPPLHYAKPSPFFMDPIYRVEKRKVTDPVGALKEKYLRPSPLLFHPQMSAIETMTEKLESFAAMKADSGSSLQPLPHHPFNFRSPPPTLSDPILRKGKERYTCRYCGKIFPRSANLTRHLRTHTGEQPYRCKYCDRSFSISSNLQRHVRNIHNKEKPFKCHLCNRCFGQQTNLDRHLKKHEHENAPVSQHPGVLTNHLGTSASSPTSESDNHALLDEKEDSYFSEIRNFIANSEMNQASTRTEKRADMQIVDGSAQCPGLASEKQEDVEEEDDDDLEEDDEDSLAGKSQDDTVSPAPEPQAAYEDEEDEEPAASLAVGFDHTRRCAEDHEGGLLALEPMPTFGKGLDLRRAAEEAFEVKDVLNSTLDSEALKHTLCRQAKNQAYAMMLSLSEDTPLHTPSQGSLDAWLKVTGATSESGAFHPINHL

SEQ ID NO: 2743 - protein, 1571 aa, Homo sapiens
MWPSQLLIFMMLLAPIIHGGKHSERHPALAAPLRHAERSPGGALPPRHLLQQPAAERTAAHRGQGPRGATRGVRGPGAQGAQIAAQAFSRAPIPMAVVRRELSCESYPIELRCPGTDVIMIESANYGRTDDKICDSDPAQMENIRCYLPDAYKIMSQRCNNRTQCAVVAGPDVFPDPCPGTYKYLEVQYECVPYKVEQKVFLCPGLLKGVYQSEHLFESDHQSGAWCKDPLQASDKIYYMPWTPYRTDTLTEYSSKDDFIAGRPTTTYKLPHRVDGTGFVVYDGALFFNKERTRNIVKFDLRTRIKSGEAIIANANYHDTSPYRWGGKSDIDLAVDENGLWVIYATEQNNGKIVISQLNPYTLRIEGTWDTAYDKRSASNAFMICGILYVVKSVYEDDDNEATGNKIDYIYNTDQSKDSLVDVPFPNSYQYIAAVDYNPRDNLLYVWNNYHVVKYSLDFGPLDSRSGQAHHGQVSYISPPIHLDSELERPSVKDISTTGPLGMGSTTTSTTLRTTTLSPGRSTTPSVSGRRNRSTSTPSPAVEVLDDMTTHLPSASSQIPALEESCEAVEAREIMWFKTRQGQIAKQPCPAGTIGVSTYLCLAPDGIWDPQGPDLSNCSSPWVNHITQKLKSGETAANIARELAEQTRNHLNAGDITYSVRAMDQLVGLLDVQLRNLTPGGKDSAARSLNKLQKRERSCRAYVQAMVETVNNLLQPQALNAWRDLTTSDQLRAATMLLHTVEESAFVLADNLLKTDIVRENTDNIKLEVARLSTEGNLEDLKFPENMGHGSTIQLSANTLKQNGRNGEIRVAFVLYNNLGPYLSTENASMKLGTEALSTNHSVIVNSPVITAAINKEFSNKVYLADPVVFTVKHIKQSEENFNPNCSFWSYSKRTMTGYWSTQGCRLLTTNKTHTTCSCNHLTNFAVLMAHVEVKHSDAVHDLLLDVITWVGILLSLVCLLICIFTFCFFRGLQSDRNTIHKNLCISLFVAELLFLIGINRTDQPIACAVFAALLHFFFLAAFTWMFLEGVQLYIMLVEVFESEHSRRKYFYLVGYGMPALIVAVSAAVDYRSYGTDKVCWLRLDTYFIWSFIGPATLIIMLNVIFLGIALYKMFHHTAILKPESGCLDNIKSWVIGAIALLCLLGLTWAFGLMYINESTVIMAYLFTIFNSLQGMFIFIFHCVLQKKVRKEYGKCLRTHCCSGKSTESSIGSGKTSGSRTPGRYSTGSQSRIRRMWNDTVRKQSESSFITGDINSSASLNRGAMANHLISNALLRPHGTNNPYNTLLGEPAVCNNPSVSMYNAQEGLLNNARDTSVMDTLPLNGNHGNSYSIASGEYLSNCVQIIDRGYNHNETALEKKILKELTSNYIPSYLNNHERSSEQNRNLMNKLVNNLGSGREDDAIVLDDATSFNHEESLGLELIHEESDAPLLPPRVYSTENHQPHHYTRRRIPQDHSESFFPLLTNEHTEDLQSPHRDSLYTSMPTLAGVAATESVTTSTQTEPPPAKCGDAEDVYYKSMPNLGSRNHVHQLHTYYQLGRGSSDGFIVPPNKDGTPPEGSSKGPAHLVTSL

SEQ ID NO: 2744 - protein, 58 aa, Homo sapiens
MSSDEEKYSLPVVQNDSSRGSSVSSNLQKILMNSSYTLYKGFNQHSKRKNMKNCFIML

SEQ ID NO: 2745 - protein, 149 aa, Homo sapiens
MEADIITNLRCRLKEAEEERLKAAQYGLQLVESQNELQNQLDKCRNEMMTMTESYEQEKYTLQREVELKSRMLESLSCECEAIKQQQKMHLEKLEEQLSRSHGQEVNELKTKIEKLKVELDEARLSEKQLKHQVDHQKELLSCKSEELR

SEQ ID NO: 2746 - protein, 472 aa, Homo sapiens
KEDVMTCLIKGCNFVLKNIPHEAFVYQKDSDPEFRFQTNHPHIFPYLLVNIGSGVSIVKVETEDRFEWVGGSSIGGGTFWGLGALLTKTKKFDELLHLASRGQHSNVDMLVRDVYGGAHQTLGLSGNLIASSFGKSATADQEFSKEDMAKSLLHMISNDIGQLACLHARLHSLDRVYFGGFFIRGHPVTMRTITYSINFFSKGEVQALFLRHEGYLGAIGAFLKGAEQDNPNQYSWGENYAGSSGLMSASPELGPAQRARSGTFDLLEMDRLERPLVDLPLLLDPPSYVPDTVDLTDDALARKYWLTCFEEALDGVVKRAVASQPDSVDAAERAEKFRQKYWNKLQTLRQQPFAYGTLTVRSLLDTREHCLNEFNFPDPYSKVKQRENGVALRCFPGVVRSLDALGWEERQLALVKGLLAGNVFDWGAKAVSAVLESDPYFGFEEAKRKLQERPWLVDSYSEWLQRLKITVE

SEQ ID NO: 2747 - protein, 5256 aa, Homo sapiens
MECPSCQHVSKEETPKFCSQCGERLPPAAPIADSENNNSTMASASEGEMECGQELKEEGGPCLFPGSDSWQENPEEPCSKASWTVQEGATSEVLVDAAVDLISDEWEAANAIPSKRRKQDAAPLEAASVPSADCEQSKKKKRKKKKKGNKSASSELASLPLSPASPCHLTLLSNPWPQDTALPHSQAQQSGPTGQPSQPPGTATTPLEGDGLSAPTEVGDSPLQAQALGEAGVATGSEAQSSPQFQDHTEGEDQDASIPSGGRGLSQEGTGPPTSAGEGHSRTEDAAQELLLPESKGGSSEPGTELQTTEQQAGASASMAVDAVAEPANAVKGAGKEMKEKTQRMKQPPATTPPFKTHCQEAETKTKDEMAAAEEKVGKNEQGEPEDLKKPEGKNRSAAAVKNEKEQKNQEADVQEVKASTLSPGGGVTVFFHAIISLHFPFNPDLHKVFIRGGEEFGESKWDSNICELHYTRDLGHDRVLVEGIVCISKKHLDKYIPYKYVIYNGESFEYEFIYKHQQKKGEYVNRCLFIKSSLLGSGDWHQYYDIVYMKPHGRLQKVMNHITDGPRKDLVKGKQIAAALMLDSTFSILQTWDTINLNSFFTQFEQFCFVLQQPMIYEGQAQLWTDLQYREKEVKRYLWQHLKKHVVPLPDGKSTDFLPVDCPVRSKLKTGLIVLFVVEKIELLLEGSLDWLCHLLTSDASSPDEFHRDLSHILGIPQSWRLYLVNLCQRCMDTRTYTWLGALPVLHCCMELAPRHKDAWRQPEDTWAALEGLSFSPFREQMLDTSSLLQFMREKQHLLSIDEPLFRSWFSLLPLSHLVMYMENFIEHLGRFPAHILDCLSGIYYRLPGLEQVLNTQDVQDVQNVQNILEMLLRLLDTYRDKIPEEALSPSYLTVCLKLHEAICSSTKLLKFYELPALSAEIVCRMIRLLSLVDSAGQRDETGNNSVQTVFQGTLAATKRWLREVFTKNMLTSSGASFTYVKEIEVWRRLVEIQFPAEHGWKESLLGDMEWRLTKEEPLSQITAYCNSCWDTKGLEDSVAKTFEKCIIEAVSSACQSQTSILQGFSYSDLRKFGIVLSAVITKSWPRTADNFDDILKHLLTLADVKHVFRLCGTDEKILANVTEDAKRLIAVADSVLTKVVGDLLSGTILVGQLELIIKHKNQFLDIWQLREKSLSPQDEQCAVEEALDWRREELLLLKKEKRCVDSLLKMCGNVKHLIQVDFGVLAVRHSQDLSSKRLNDTVTVRLSTSSNSQRATHYHLSSQVQEMAGKIDLLRDSHIFQLFWREAAEPLSEPKEDQEAAELLSEPEEESERHILELEEVYDYLYQPSYRKFIKLHQDLKSGEVTLAEIDVIFKDFVNKYTDLDSELKIMCTVDHQDQRDWIKDRVEQIKEYHHLHQAVHAAKVILQVKESLGLNGDFSVLNTLLNFTDNFDDFRRETLDQINQELIQAKKLLQDISEARCKGLQALSLRKEFICWVREALGGINELKVFVDLASISAGENDIDVDRVACFHDAVQGYASLLFKLDPSVDFSAFMKHLKKLWKALDKDQYLPRKLCDSARNLEWLKTVNESHGSVERSSLTLATAINQRGIYVIQAPKGGQKISPDTVLHLILPESPGSHEESREYSLEEVKELLNKLMLMSGKKDRNNTEVERFSEVFCSVQRLSQAFIDLHSAGNMLFRTWIAMAYCSPKQGVSLQMDFGLDLVTELKEGGDVTELLAALCRQMEHFLDSWKRFVTQKRMEHFYLNFYTAEQLVYLSTELRKQPPSDAALTMLSFIKSNCTLRDVLRASVGCGSEAARYRMRRVMEELPLMLLSEFSLVDKLRIIMEQSMRCLPAFLPDCLDLETLGHCLAHLAGMGGSPVERCLPRGLQVGQPNLVVCGHSEVLPAALAVYMQTPSQPLPTYDEVLLCTPATTFEEVALLLRRCLTLGSLGHKVYSLLFADQLSYEVARQAEELFHNLCTQQHREDYQLVMVCDGDWEHCYLPSAFSQHKVFVTPQAPLEAIQAYLAGHYRVPKQTLSAAAVFNDRLCVGIVASERAGVGKSLYVKRLHDKMKMQLNVKNVPLKTIRLIDPQVDESRVLGALLPFLDAQYQKVPVLFHLDVTSSVQTGIWVFLFKLLILQYLMDINGKMWLRNPCHLYIVEILERRTSVPSRSSSALRTRVPQFSFLDIFPKVTCRPPKEVIDMELSALRSDTEPGMDLWEFCSETFQRPYQYLRRFNQNQDLDTFQYQEGSVEGTPEECLQHFLFHCGVINPSWSELRNFARFLNYQLRDCEASLFCNPSFIGDTLRGFKKFVVTFMIFMARDFATPSLHTSDQSPGKHMVTMDGVREEDLAPFSLRKRWESEPHPYVFFNDDHTTMTFIGFHLQPNINGSVDAISHLTGKVIKRDVMTRDLYQGLLLQRVPFNVDFDKLPRHKKLERLCLTLGIPQATDPDKTYELTTDNMLKILAIEMRFRCGIPVIIMGETGCGKTRLIKFLSDLRRGGTNADTIKLVKVHGGTTADMIYSRVREAENVAFANKDQHQLDTILFFDEANTTEAISCIKEVLCDHMVDGQPLAEDSGLHIIAACNPYRKHSEEMICRLESAGLGYRVSMEETADRLGSIPLRQLVYRVHALPPSLIPLVWDFGQLSDVAEKLYIQQIVQRLVESISLDENGTRVITEVLCASQGFMRKTEDECSFVSLRDVERCVKVFRWFHEHSAMLLAQLNAFLSKSSVSKNHTERDPVLWSLMLAIGVCYHASLEKKDSYRKAIARFFPKPYDDSRLLLDEITRAQDLFLDGVPLRKTIAKNLALKENVFMMVVCIELKIPLFLVGKPGSSKSLAKTIVADAMQGPAAYSDLFRSLKQVHLVSFQCSPHSTPQGIISTFRQCARFQQGKDLQQYVSVVVLDEVGLAEDSPKMPLKTLHPLLEDGCIEDDPAPHKKVGFVGISNWALDPAKMNRGIFVSRGSPNETELIESAKGICSSDILVQDRVQGYFASFAKAYETVCKRQDKEFFGLRDYYSLIKMVFAAAKASNRKPSPQDIAQAVLRNFSGKDDIQALDIFLANLPEAKCSEEVSPMQLIKQNIFGPSQKVPGGEQEDAESRYLLVLTKNYVALQILQQTFFEGDQQPEIIFGSGFPKDQEYTQLCRNINRVKICMETGKMVLLLNLQNLYESLYDALNQYYVHLGGQKYVDLGLGTHRVKCRVHPNFRLIVIEEKDVVYKHFPIPLINRLEKHYLDINTVLEKWQKSIVEELCAWVEKFINVKAHHFQKRHKYSPSDVFIGYHSDACASVVLQVIERQGPRALTEELHQKVSEEAKSILLNCATPDAVVRLSAYSLGGFAAEWLSQEYFHRQRHNSFADFLQAHLHTADLERHAIFTEITTFSRLLTSHDCEILESEVTGRAPKPTLLWLQQFDTEYSFLKEVRNCLTNTAKCKILIFQTDFEDGIRSAQLIASAKYSVINEINKIRENEDRIFVYFITKLSRVGRGTAYVGFHGGLWQSVHIDDLRRSTLMVSDVTRLQHVTISQLFAPGDLPELGLEHRAEDGHEEAMETEASTSGEVAEVAEEAMETESSEKVGKETSELGGSDVSILDTTRLLRSCVQSAVGMLRDQNESCTRNMRRVVLLLGLLNEDDACHASFLRVSKMRLSVFLKKQEESQFHPLEWLAREACNQDALQEAGTFRHTLWKRVQGAVTPLLASMISFIDRDGNLELLTRPDTPPWARDLWMFIFSDTMLLNIPLVMNNERHKGEMAYIVVQNHMNLSENASNNVPFSWKIKDYLEELWVQAQYITDAEGLPKKFVDIFQQTPLGRFLAQLHGEPQQELLQCYLKDFILLTMRVSTEEELKFLQMALWSCTRKLKAASEAPEEEVSLPWVHLAYQRFRSRLQNFSRILTIYPQVLHSLMEARWNHELAGCEMTLDAFAAMACTEMLTRNTLKPSPQAWLQLVKNLSMPLELICSDEHMQGSGSLAQAVIREVRAQWSRIFSTALFVEHVLLGTESRVPELQGLVTEHVFLLDKCLRENSDVKTHGPFEAVMRTLCECKETASKTLSRFGIQPCSICLGDAKDPVCLPCDHVHCLRCLRAWFASEQMICPYCLTALPDEFSPAVSQAHREAIEKHARFRQMCNSFFVDLVSTICFKDNAPPEKEVIESLLSLLFVQKGRLRDAAQRHCEHTKSLSPFNDVVDKTPVIRSVILKLLLKYSFHDVKDYIQEYLTLLKKKAFITEDKTELYMLFINCLEDSILEKTSAYSRNDELNHLEEEGRFLKAYSPASRGREPANEASVEYLQEVARIRLCLDRAADFLSEPEGGPEMAKEKQCYLQQVKQFCIRVENDWHRVYLVRKLSSQRGMEFVQGLSKPGRPHQWVFPKDVVKQQGLRQDHPGQMDRYLVYGDEYKALRDAVAKAVLECKPLGIKTALKACKTPQSQQSAYFLLTLFREVAILYRSHNASLHPTPEQCEAVSKFIGECKILSPPDISRFATSLVDNSVPLLRAGPSDSNLDGTVTEMAIHAAAVLLCGQNELLEPLKNLAFSPATMAHAFLPTMPEDLLAQARRWKGLERVHWYTCPNGHPCSVGECGRPMEQSICIDCHAPIGGIDHKPRDGFHLVKDKADRTQTGHVLGNPQRRDVVTCDRGLPPVVFLLIRLLTHLALLLGASQSSQALINIIKPPVRDPKGFLQQHILKDLEQLAKMLGHSADETIGVVHLVLRRLLQEQHQLSSRRLLNFDTELSTKEMRNNWEKEIAAVISPELEHLDKTLPTMNNLISQDKRISSNPVAKIIYGDPVTFLPHLPRKSVVHCSKIWSCRKRITVEYLQHIVEQKNGKERVPILWHFLQKEAELRLVKFLPEILALQRDLVKQFQNVQQVEYSSIRGFLSKHSSDGLRQLLHNRITVFLSTWNKLRRSLETNGEINLPKDYCSTDLDLDTEFEILLPRRRGLGLCATALVSYLIRLHNEIVYAVEKLSKENNSYSVDAAEVTELHVISYEVERDLTPLILSNCQYQVEEGRETVQEFDLEKIQRQIVSRFLQGKPRLSLKGIPTLVYRHDWNYEHLFMDIKNKMAQDSLPSSVISAISGQLQSYSDACEVLSVVEVTLGFLSTAGGDPNMQLNVYTQDILQMGDQTIHVLKALNRCQLKHTIALWQFLSAHKSEQLLRLHKEPFGEISSRYKADLSPENAKLLSTFLNQTGLDAFLLELHEMIILKLKNPQTQTEERFRPQWSLRDTLVSYMQTKESEILPEMASQFPEEILLASCVSVWKTAAVLKWNREMR

SEQ ID NO: 2748 - protein, 335 aa, Homo sapiens
MVAVGICHTDDHVVSGNLVTPLPVILGHEAAGIVESVGEGVTTVKPGDKVIPLFTPQCGKCRVCKNPESNYCLKNDLGNPRGTLQDGTRRFTCRGKPIHHFLGTSTFSQYTVVDENAVAKIDAASPLEKVCLIGCGFSTGYGSAVNVAKVTPGSTCAVFGLGGVGLSAVMGCKAAGAARIIAVDINKDKFAKAKELGATECINPQDYKKPIQEVLKEMTDGGVDFSFEVIGRLDTMMASLLCCHEACGTSVIVGVPPASQNLSINPMLLLTGRTWKGAVYGGFKSKEGIPKLVADFMAKKFSLDALITHVLPFEKINEGFDLLHSGKSIRTVLTF

SEQ ID NO: 2749 - protein, 435 aa, Homo sapiens
MNKSRWQSRRRHGRRSHQQNPWFRLRDSEDRSDSRAAQPAHDSGHGDDESPSTSSGTAGTSSVPELPGFYFDPEKKRYFRLLPGHNNCNPLTKESIRQKEMESKRLRLLQEEDRRKKADTNSDRLFTVNDVKVGGSKYGIINLQSLKTPTLKVFMHENLYFTNRKVNSVCWASLNHLDSHILLCLMGLAETPGCATLLPASLFVNSHPAGIDRPGMLCSFRIPGAWSCAWSLNIQANNCFSTGLSRRVLLTNVVTGHRQSFGTNSDVLAQQFALMAPLLFNGCRSGEIFAIDLRCGNQGKGWKATRLFHDSAVTSVRILQDEQYLMASDMAGKIKLWDLRTTKCVRQYEGHVNEYAYLPLHVHEEEGILVAVGQDCYTRIWSLHDARLLRTIPSPYPASKADIPSVAFSSRLGGSRGAPGLLMAVGQDLYCYSYS

SEQ ID NO: 2750 - protein, 127 aa, Homo sapiens
MEEPQSDPSVEPPLSQETFSDLWKLLPENNVLSPLPSQAMDDLMLSPDDIEQWFTEDPGPDEAPRMPEAAPPVAPAPAAPTPAAPAPAPSWPLSSSVPSQKTYQGSYGFRLGFLHSGTAKSVTCTYS

SEQ ID NO: 2751 - protein, 1889 aa, Homo sapiens
QQLCILPPHHVNVLPPLHIKTEAVWLAYKLGDWKTSVSIGVAFQLFCKRDSNFMRSKKKSLNLPLRMTPAQIFQEKLQCVLGQPASLEAKNEMGSKYKQFTDPIEEEDANLLFGSVQEVLKASVMADADILSETFQLLIDSAKDFSKRLWGLVPFGLYLPAPPLYCPQPAILSEEDGDDLLLKAEKNNRQKVSGILQRVLLLFRAAQCSFPVAQWYILQLRWARKVMQKIRMKGSLPSLSPFPQSLLNYCKGGIAFFRPGAAGDHKLDEVSIRAIGCFRELCALCWMLHVRDKLSYSCRQYQKARENVKGEKDLEVEFDSCMIEHCLSAVEWAYRMLPFSRFFNMEELIQDIILSLIGELPPIRKVAEIFVKAFPYPEDVRVPLRDKYHSLHQRLRHCVVKGPQTEEMMSVVMHSIQKVRVKALKRVQRNIGSFEVNIWEPIEEEKPDEAPGVDRYSLGTSLSRSTLTELGDSVVHSDADTFSEALSVEEKSRINIYQRNAPNHMELTSIHKPTDKRKMCNQKENPTKKEDHEKLSQNTLPVIGVWEFERDDDEYIKFLDLFLSYILERDLPYSRDADIPFLTSFSGKLREHELNSLLFDVHTTLKRHQSKTKSQNVFRAGSCFVVAPESYESEKSSSLNDEYGMHLENQKLSSSVLVNQGIKPFLQYPSNEVNKNEGMSGLFGLKQRSIYKIQDDTREKCLIQRSSNHIFWTPKSIKTRRCIFKAIQCNDINPQEDLPLALNTFGSIGRLLEWMIRWSNRRLLCDSGITESSSEYSPVIRVKTSTAAILTSLWLLEQPYFATYKAKNAIIKMVENRDTGCQIGPNIERESKSDAGGSVAVATPGGTEERNGQNKSCQNILNRMPTEAKNPDIKEINDDIISITHNTKKEFIDIDENLLEVEAFTEEEMDMHISDYEDIEESVGGFRSPSLAICMMTLPQQLEEEFTEEVQCQREEPLETIMEEKSTEQKGMIEAFSHPGHTTPQSMQVDTSSEISSAQISTYKEKSSSVPLLISNGVNVASQPPAPTPQKTQRNEFTAQLPDCSESVRQMLQDEMFKLVQLQQINFMSLMQIVGSSFANLPDTQQLVQQSQSVHLGESQESNLRGCGDVEDSNKNLKERFFIKPQSMGENAREPRKNSPHCHEGTIPSGQNSTGNVQNVPHGSIPLCQLNGQPRKKGPIPSSQNLPSTSFYPAPAGNTHLYLLSTPSVVQKAPRLIPHAKTFSPGDGFPLLQFKSKQEFQPLFLHTGSIPQVPFRPLPQPREAWGLSDSFQPALPQRAAQTTPASHLNVSQYNTEARKKEVEQKTWAETVITEIPNHVNLDQYVGQENLTPQQDSSVFIKPEKLFDVKPGTLEISPHHSFGLPLLYLPLKPPNMFPSTSRASITVPSTPIQPIAEERKYPRLSLLHSHLSPENRCKKTQLIPLENLIAFKQSQQKLTHNLFEQGDAGHLQLLKVKIEPPEVRQGKDSKKRQRRRAEKELQEKRCEKLRRKPNVTFRPENSIINNDDSEIIKKPKEQQEHCGSHPLDDFDVPFEMLQDDNTSAGLHFMASVKKKAIGSQDASTNTDPEHEPLTAPQLLVPDVYLNLKLSSEMSEKPWSPSIPHTVTNLVGHTYINVIDIEANDLLQELPVREEPSNDNVIKQQSDHLAVPSSAELHYMAASVTNAVPPHNFKSQEVTPACLDGKSLRAGITEVKEPSVTSPTPSDIQQNKGLPKPEFRFKGQSTKSDSAEDYLLWKRLQGVSAACPAPSSAAHQLEHLSAKLQKIDEQLLAIQNIAENIEQDFPKPEMLDLHCDKIGPVDHIEFSSGPEFKKTLASKTISISEEVRFLTHMDEEDQSDKKETSEPEFSITENYSGQKTCVFPTADSAVSLSSSSDQNTTSPVFQYIRSR

SEQ ID NO: 2752 - protein, 2546 aa, Homo sapiens
IKAPIEDLDLEGQKLLQRIQSSESFPKKNSGSGNADLQNLLPKVSTMLDRLHSTRQHLHQMWHVRKLKLDQCFQLRLFEQDAEKMFDWITHNKGLFLNSYTEIGTSHPHAMELQTQHNHFAMNCMNVYVNINRIMSVANRLVESGHYASQQIRQIASQLEQEWKAFAAALDERSTLLDMSSIFHQKAEKYMSNVDSWCKACGEVDLPSELQDLEDAIHHHQGIYEHITLAYSEVSQDGKSLLDKLQRPLTPGSSDSLTASANYSKAVHHVLDVIHEVLHHQRQLENIWQHRKVRLHQRLQLCVFQQDVQQVLDWIENHGEAFLSKHTGVGKSLHRARALQKRHEDFEEVAQNTYTNADKLLEAAEQLAQTGECDPEEIYQAAHQLEDRIQDFVRRVEQRKILLDMSVSFHTHVKELWTWLEELQKELLDDVYAESVEAVQDLIKRFGQQQQTTLQVTVNVIKEGEDLIQQLRDSAISSNKTPHNSSINHIETVLQQLDEAQSQMEELFQERKIKLELFLQLRIFERDAIDIISDLESWNDELSQQMNDFDTEDLTIAEQRLQHHADKALTMNNLTFDVIHQGQDLLQYVNEVQASGVELLCDRDVDMATRVQDLLEFLHEKQQELDLAAEQHRKHLEQCVQLRHLQAEVKQVLGWIRNGESMLNAGLITASSLQEAEQLQREHEQFQHAIEKTHQSALQVQQKAEAMLQANHYDMDMIRDCAEKVASHWQQLMLKMEDRLKLVNASVAFYKTSEQVCSVLESLEQEYKREEDWCGGADKLGPNSETDHVTPMISKHLEQKEAFLKACTLARRNADVFLKYLHRNSVNMPGMVTHIKAPEQQVKNILNELFQRENRVLHYWTMRKRRLDQCQQYVVFERSAKQALEWIHDNGEFYLSTHTSTGSSIQHTQELLKEHEEFQITAKQTKERVKLLIQLADGFCEKGHAHAAEIKKCVTAVDKRYRDFSLRMEKYRTSLEKALGISSDSNKSSKSLQLDIIPASIPGSEVKLRDAAHELNEEKRKSARRKEFIMAELIQTEKAYVRDLRECMDTYLWEMTSGVEEIPPGIVNKELIIFGNMQEIYEFHNNIFLKELEKYEQLPEDVGHCFVTWADKFQMYVTYCKNKPDSTQLILEHAGSYFDEIQQRHGLANSISSYLIKPVQRITKYQLLLKELLTCCEEGKGEIKDGLEVMLSVPKRANDAMHLSMLEGFDENIESQGELILQESFQVWDPKTLIRKGRERHLFLFEMSLVFSKEVKDSSGRSKYLYKSKLFTSELGVTEHVEGDPCKFALWVGRTPTSDNKIVLKASSIENKQDWIKHIREVIQERTIHLKGALKEPIHIPKTAPATRQKGRRDGEDLDSQGDGSSQPDTISIASRTSQNTLDSDKLSGGCELTVVIHDFTACNSNELTIRRGQTVEVLERPHDKPDWCLVRTTDRSPAAEGLVPCGSLCIAHSRSSMEMEGIFNHKDSLSVSSNDASPPASVASLQPHMIGAQSSPGPKRPGNTLRKWLTSPVRRLSSGKADGHVKKLAHKHKKSREVRKSADAGSQKDSDDSAATPQDETVEERGRNEGLSSGTLSKSSSSGMQSCGEEEGEEGADAVPLPPPMAIQQHSLLQPDSQDDKASSRLLVRPTSSETPSAAELVSAIEELVKSKMALEDRPSSLLVDQGDSSSPSFNPSDNSLLSSSSPIDEMEERKSSSLKRRHYVLQELVETERDYVRDLGYVVEGYMALMKEDGVPDDMKGKDKIVFGNIHQIYDWHRDFFLGELEKCLEDPEKLGSLFVKHERRLHMYIAYCQNKPKSEHIVSEYIDTFFEDLKQRLGHRLQLTDLLIKPVQRIMKYQLLLKDFLKYSKKASLDTSELERAVEVMCIVPRRCNDMMNVGRLQGFDGKIVAQGKLLLQDTFLVTDQDAGLLPRCRERRIFLFEQIVIFSEPLDKKKGFSMPGFLFKNSIKVSCLCLEENVENDPCKFALTSRTGDVVETFILHSSSPSVRQTWIHEINQILENQRNFLNALTSPIEYQRNHSGGGGGGGSGGSGGGGGSGGGGAPSGGSGHSGGPSSCGGAPSTSRSRPSRIPQPVRHHPPVLVSSAASSQAEADKMSGTSTPGPSLPPPGAAPEAGPSAPSRRPPGADAEGSEREAEPIPKMKVLESPRKGAANASGSSPDAPAKDARASLGTLPLGKPRAGAASPLNSPLSSAVPSLGKEPFPPSSPLQKGGSFWSSIPASPASRPGSFTFPGDSDSLQRQTPRHAAPGKDTDRMSTCSSASEQSVQSTQSNGSESSSSSNISTMLVTHDYTAVKEDEINVYQGEVVQILASNQQNMFLVFRAATDQCPAAEGWIPGFVLGHTSAVIVENPDGTLKKSTSWHTALRLRKKSEKKDKDGKREGKLENGYRKSREGLSNKVSVKLLNPNYIYDVPPEFVIPLSEVTCETGETVVLRCRVCGRPKASITWKGPEHNTLNNDGHYSISYSDLGEATLKIVGVTTEDDGIYTCIAVNDMGSASSSASLRVLGPGMDGIMVTWKDNFDSFYSEVAELGRANWNNWSPY

SEQ ID NO: 2753 - protein, 955 aa, Homo sapiens
MVNPTLGVHEADLLKTSGTLISFIYPAQNPELLNKLSQRKTTVLAMDQVPRVTIAQGYDALSSMANIAGYKAVVLAANHFGRFFTGQITAAGKVPPAKILIVGGGVAGLASAGAAKSMGAIVRGFDTRAAALEQFKSLGAEPLEVDLKESGEGQGGYAKEMSKEFIEAEMKLFAQQCKEVDILISTALIPGKKAPVLFNKEMIESMKEGSVVVDLAAEAGGNFETTKPGELYIHKGITHIGYTDLPSRMATQASTLYSNNITKLLKAISPDKDNFYFDVKDDFDFGTMGHVIRGTVVMKDGKVIFPAPTPKNIPQGAPVKQKTVAELEAEKAATITPFRKTMSTASAYTAGLTGILGLGIAAPNLAFSQMVTTFGLAGIVGYHTVWGVTPALHSPLMSVTNAISGLTAVGGLALMGGHLYPSTTSQGLAALAAFISSVNIAGGFLVTQRMLDMFKRPTDPPEYNYLYLLPAGTFVGGYLAALYSGYNIEQIMYLGSGLCCVGALAGLSTQGTARLGNALGMIGVAGGLAATLGVLKPGPELLAQMSGAMALGGTIGLTIAKRIQISDLPQLVAAFHSLVGLAAVLTCIAEYIIEYPHFATDAAANLTKIVAYLGTYIGGVTFSGSLIAYGKLQGLLKSAPLLLPGRHLLNAGLLAASVGGIIPFMVDPSFTTGITCLGSVSALSAVMGVTLTAAIGGADMPVVITVLNSYSGWALCAEGFLLNNNLLTIVGALIGSSGAILSYIMCVAMNRSLANVILGGYGTTSTAGGKPMEISGTHTEINLDNAIDMIREANSIIITPGYGLCAAKAQYPIADLVKMLTEQGKKVRFGIHPVAGRMPGQLNVLLAEAGVPYDIVLEMDEINHDFPDTDLVLVIGANDTVNSAAQEDPNSIIAGMPVLEVWKSKQVIVMKRSLGVGYAAVDNPIFYKPNTAMLLGDAKKTCDALQAKVRESYQK

SEQ ID NO: 2754 - protein, 1399 aa, Homo sapiens
PPPPPPPMWNPMIPAFDLFQGNHGFVAPVVTTAAHWRSVNYTFPPSVISHTSPTKVWRNKDGTSAYQVQETPVSQVVRKKTSYVGLVLVLLRGLPGSGKSFLARTLQEDNPSGVILSTDDYFYINGQYQFDVKYLGEAHEWNQNRAKEAFEKKISPIIIDNTNLQAWEMKPYVALSQKHKYKVLFREPDTWWKFKPKELARRNIHGVSKEKITRMLEHYQRFVSVPIIMSSSVPEKIERIELCAYSCEDRSTSPRDDEDIISEKEENILSLSLKHLEFTEEKNLDVTKETMLPENVAYLSNADLNKRRKEISDMNPSIQSALILETPHMYFSDSESKLQATDKSENEQIEMVAVKGYSKTDTDSSMERVSPSTCCSENNQEDCDLANSGPLQNEKSSPGEIVEERATVTKKAFGKQKSKSTLEKFPRHELSNFVGDWPVDKTIGQRTKRNRKTEKTSSVQSDKKYNYPQSHKLVNSVSVNTDCVQQRGSPHESVEDGRKSQCDDASEPLNSYKYDAYKNIDKNSFNIMGDWPSSDSLAQREHRSRMPKTGLSEPNLEIGTNDKMNEISLSTAHEACWGTSSQKLKTLGSSNLGSSEMLLSEMTCESQTCLSKKSHGQHTSLPLTFTNSAPTVSGVVEPQTLAECQEQMPKRDPGKEVGMCTQTEPQDFALLWKIEKNKISISDSIKVLTGRLDGFKPKVFNINTKSDVQEAIPYRVMYDKSTFVEESELTSADESENLNILCKLFGSFSLEALKDLYERCNKDIIWATSLLLDSETKLCEDTEFENFQKSCDGSQIGPFSLGLNLKEIISQRGTLENSNSPVPEFSHGIGISNADSQSTCDAERGNSEQAEMRAVTPENHESMTSIFPSAAVGLKNNNDILPNSQEELLYSSKQSFPGILKATTPKDMSETEKNLVVTETGDNIHSPSHFSDIFNFVSSTSNLELNEEIYFTDSLEIKRNENFPKDYVKFSDEEEFMNEDEKEMKEILMAGSSLSAGVSGEDKTEILNPTPAMAKSLTIDCLELALPPELAFQLNELFGPVGIDSGSLTVEDCVVHIDLNLAKVIHEKWKESVMERQRQEEVSCGKFMQDPSLVGHTGLDNPEQKSSQRTGKKLLKTLTASEMLPLLDHWNTQTKKVSLREIMSEEIALQEKHNLKRETLMFEKDCATKLKEKQLFKIFPAINQNFLVDIFKDHNYSLEHTVQFLNCVLEGDPVKTVVAQEFVHQNENVTSHTGQKSKEKKDFEYPDYDDYRAEAFLHQQKRMECYSKAKEAYRIGKKNVATFYAQQGTLHEQKMKEANHLAAIEIFEKVNASLLPQNVLDLHGLHVDEALEHLMRVLEKKTEEFKQNGGKPYLSVITGRGNHSQGGVARIKPAVIKYLISHSFRFSEIKPGCLKVMLK

SEQ ID NO: 2755 - protein, 114 aa, Homo sapiens
MRLLLALLGVLLSVPGPPVLSLEASEEVELEPCLAPSLEQQEQELTVALGQPVRLCCGRAERGGHWYKEGSRLAPAGRVRGWRGRLEIASFLPEDAGRYLCLARGSMIVLQNLT

SEQ ID NO: 2756 - protein, 54 aa, Homo sapiens
MAGLALQPGTALLCYSCKAQVSNEDCLQVENCTQLGEQCWTARIREWGDDSRQA

SEQ ID NO: 2757 - protein, 1690 aa, Homo sapiens
MEPWSSRWKTKRWLWDFTVTTLALTFLFQAREVRGAAPVDVLKALDFHNSPEGISKTTGFCTNRKNSKGSDTAYRVSKQAQLSAPTKQLFPGGTFPEDFSILFTVKPKKGIQSFLLSIYNEHGIQQIGVEVGRSPVFLFEDHTGKPAPEDYPLFRTVNIADGKWHRVAISVEKKTVTMIVDCKKKTTKPLDRSERAIVDTNGITVFGTRILDEEVFEGDIQQFLITGDPKAAYDYCEHYSPDCDSSAPKAAQAQEPQIDEYAPEDIIEYDYEYGEAEYKEAESVTEGPTVTEETIAQTEINGHGAYGEKGQKGEPAVVEPGMLVEGPPGPAGPAGIMGPPGLQGPTGPPGDPGDRGPPGRPGLPGADGLPGPPGTMLMLPFRYGGDGSKGPTISAQEAQAQAILQQARIALRGPPGPMGLTGRPGPVGGPGSSGAKGESGDPGPQGPRGVQGPPGPTGKPGKRGRPGADGGRGMPGEPGAKGDRGFDGLPGLPGDKGHRGERGPQGPPGPPGDDGMRGEDGEIGPRGLPGEAGPRGLLGPRGTPGAPGQPGMAGVDGPPGPKGNMGPQGEPGPPGQQGNPGPQGLPGPQGPIGPPGEKGPQGKPGLAGLPGADGPPGHPGKEGQSGEKGALGPPGPQGPIGYPGPRGVKGADGVRGLKGSKGEKGEDGFPGFKGDMGLKGDRGEVGQIGPRGEDGPEGPKGRAGPTGDPGPSGQAGEKGKLGVPGLPGYPGRQGPKGSTGFPGFPGANGEKGARGVAGKPGPRGQRGPTGPRGSRGARGPTGKPGPKGTSGGDGPPGPPGERGPQGPQGPVGFPGPKGPPGPPGKDGLPGHPGQRGETGFQGKTGPPGPGGVVGPQGPTGETGPIGERGHPGPPGPPGEQGLPGAAGKEGAKGDPGPQGISGKDGPAGLRGFPGERGLPGAQGAPGLKGGEGPQGPPGPVGSPGERGSAGTAGPIGLPGRPGPQGPPGPAGEKGAPGEKGPQGPAGRDGVQGPVGLPGPAGPAGSPGEDGDKGEIGEPGQKGSKGDKGENGPPGPPGLQGPVGAPGIAGGDGEPGPRGQQGMFGQKGDEGARGFPGPPGPIGLQGLPGPPGEKGENGDVGPMGPPGPPGPRGPQGPNGADGPQGPPGSVGSVGGVGEKGEPGEAGNPGPPGEAGVGGPKGERGEKGEAGPPGAAGPPGAKGPPGDDGPKGNPGPVGFPGDPGPPGEPGPAGQDGVGGDKGEDGDPGQPGPPGPSGEAGPPGPPGKRGPPGAAGAEGRQGEKGAKGEAGAEGPPGKTGPVGPQGPAGKPGPEGLRGIPGPVGEQGLPGAAGQDGPPGPMGPPGLPGLKGDPGSKGEKGHPGLIGLIGPPGEQGEKGDRGLPGTQGSPGAKGDGGIPGPAGPLGPPGPPGLPGPQGPKGNKGSTGPAGQKGDSGLPGPPGSPGPPGEVIQPLPILSSKKTRRHTEGMQADADDNILDYSDGMEEIFGSLNSLKQDIEHMKFPMGTQTNPARTCKDLQLSHPDFPDGEYWIDPNQGCSGDSFKVYCNFTSGGETCIYPDKKSEGVRISSWPKEKPGSWFSEFKRGKLLSYLDVEGNSINMVQMTFLKLLTASARQNFTYHCHQSAAWYDVSSGSYDKALRFLGSNDEEMSYDNNPFIKTLYDGCASRKGYEKTVIEINTPKIDQVPIVDVMINDFGDQNQKFGFEVGPVCFLG

SEQ ID NO: 2758 - protein, 685 aa, Homo sapiens
SEDCEVAGYRVLKGTEAVIIPYALHRDPRYFPNPEEFQPERFFPENAQGRHPYAYVPFSAGPRNCIGCLTQLYENAFFRGGDVASMYTPNAQYCQMRCTFHPRCLLFSFLPASSINDMEKRFGCFLKDSVTGTLPKVHRTGAVSGHSLKQCGHQISACHRDIYKGVDMRGVNFNVSKVSSVEECQKRCTSNIRCQFFSYATQTFHKAEYRNNCLLKYSPGGTPTAIKVLSNVESGFSLKPCALSEIGCHMNIFQHLAFSDVDVARVLTPDAFVCRTICTYHPNCLFFTFYTNVWKIESQRNVCLLKTSESGTPSSSTPQENTISGYSLLTCKRTLPEPCHSKIYPGVDFGGEELNVTFVKGVNVCQETCTKMIRCQFFTYSLLPEDCKEEKCKCFLRLSMDGSPTRIAYGTQGSSGYSLRLCNTGDNSVCTTKTSTRIVGGTNSSWGEWPWQVSLQVKLTAQRHLCGGSLIGHQWVLTAAHCFDGLPLQDVWRIYSGILNLSDITKDTPFSQIKEIIIHQNYKVSEGNHDIALIKLQAPLNYTEFQKPICLPSKGDTSTIYTNCWVTGWGFSKEKGEIQNILQKVNIPLVTNEECQKRYQDYKITQRMVCAGYKEGGKDACKGDSGGPLVCKHNGMWRLVGITSWGEGCARREQPGVYTKVAEYMDWILEKTQSSDGKAQMQSPA

SEQ ID NO: 2759 - protein, 809 aa, Homo sapiens
MLRFPTCFPSFRVVGEKQLPQEIIFLVWSPKRDLIALANTAGEVLLHRLASFHRVWSFPPNENTGKEVTCLAWRPDGKLLAFALADTKKIVLCDVEKPESLHSFSVEAPVSCMHWMEVTVESSVLTSFYNAEDESNLLLPKLPTLPKNYSNTSKIFSEENSDEIIKLLGDVRLNILVLGGSSGFIELYAYGMFKIARVTGIAGTCLALCLSSDLKSLSVVTEVSTNGASEVSYFQLETNLLYSFLPEVTRMARKFTHISALLQYINLSLTCMCEAWEEILMQMDSRLTKFVQEKNTTTSVQDEFMHLLLWGKASAELQTLLMNQLTVKGLKKLGQSIESSYSSIQKLVISHLQSGSESLLYHLSELKGMASWKQKYEPLGLDAAGIEEAITAVGSFILKANELLQVIDSSMKNFKAFFRWLYVAMLRMTEDHVLPELNKVMTQKDITFVAEFLTEHFNEAPDLYNRKGKYFNVERVGQYLKDEDDDLVSPPNTEGNQWYDFLQNSSHLKESPLLFPYYPRKSLHFVKRRMENIIDQCLQKPADVIGKSMNQAICIPLYRDTRSEDSTRRLFKFPFLWNNKTSNLHYLLFTILEDSLYKMCILRRHTDISQSVSNGLIAIKFGSFTYATTEKVRRSIYSCLDAQFYDDETVTVVLKDTVGREGRDRLLVQLPLSLVYNSEDSAEYQFTGTYSTRLDEQCSAIPTRTMHFEKHWRLLESMKAQYVAGNGFRKVSCVLSSNLRHVRVFEMDIDDEWELDESSDEEEEASNKPVKIKEEVLSESEAENQQAGAAALAPEIVIKVEKLDPELDS

SEQ ID NO: 2760 - protein, 1504 aa, Homo sapiens
DNVIFVHNTIHLISQVMDNMVMACGGILPLLSAATSATHELENIEPTQGLSIEASVTFLQRLISLVDVLIFASSLGFTEIEAEKSMSSGGILRQCLRLVCAVAVRNCLECQQHSQLKTRGDKALKPMHSLIPLGKSAAKSPVDIVTGGISPVRDLDRLLQDMDINRLRAVVFRDIEDSKQAQFLALAVVYFISVLMVSKYRDILEPQNERHSQSCTETGSENENVSLSEITPAAFSTLTTASVEESESTSSARRRDSGIGEETATGLGSHVEVTPHTAPPGVSAGPDAISEVLSTLSLEVNKSPETKNDRGNDLDTKATPSVSVSKNVNVKDILRSLVNIPADGVTVDPALLPPACLGALGDLSVEQPVQFRSFDRSVIVAAKKSAVSPSTFNTSIPTNAVSVVSSVDSAQASDMGGESPGSRSSNAKLPSVPTVDSVSQDPVSNMSITERLEHALEKAAPLLREIFVDFAPFLSRTLLGSHGQELLIEGTSLVCMKSSSSVVELVMLLCSQEWQNSIQKNAGLAFIELVNEGRLLSQTMKDHLVRVANEAEFILSRQRAEDIHRHAEFESLCAQYSADKREDEKMCDHLIRAAKYRDHVTATQLIQKIINILTDKHGAWGNSAVSRPLEFWRLDYWEDDLRRRRRFVRNPLGSTHPEATLKTAVEHATDEDILAKGKQSIRSQALGNQNSENEILLEGDDDTLSSVDEKDLENLAGPVSLSTPAQLVAPSVVVKGTLSVTSSELYFEVDEEDPNFKKIDPKILAYTEGLHGKWLFTEIRSIFSRRYLLQNTALEIFMANRVAVMFNFPDPATVKKVVNYLPRVGVGTSFGLPQTRRISLASPRQLFKASNMTQRWQHREISNFEYLMFLNTIAGRSYNDLNQYPVFPWVITNYESEELDLTLPTNFRDLSKPIGALNPKRAAFFAERYESWEDDQVPKFHYGTHYSTASFVLAWLLRIEPFTTYFLNLQGGKFDHADRTFSSISRAWRNSQRDTSDIKELIPEFYYLPEMFVNFNNYNLGVMDDGTVVSDVELPPWAKTSEEFVHINRLALESEFVSCQLHQWIDLIFGYKQQGPEAVRALNVFYYLTYEGAVNLNSITDPVLREAVEAQIRSFGQTPSQLLIEPHPPRGSAMQVSPLMFTDKAQQDVIMVLKFPSNSPVTHVAANTQPGLATPAVITVTANRLFAVNKWHNLPAHQGAVQDQPYQLPVEIDPLIASNTGMHRRQITDLLDQSIQVHSQCFVITSDNRYILVCGFWDKSFRVYSTDTGRLIQVVFGHWDVVTCLARSESYIGGNCYILSGSRDATLLLWYWNGKCSGIGDNPGSETAAPRAILTGHDYEVTCAAVCAELGLVLSGSQEGPCLIHSMNGDLLRTLEGPENCLKPKLIQASREGHCVIFYENGLFCTFSVNGKLQATMETDDNIRAIQLSRDGQYLLTGGDRGVVVVRQVSDLKQLFAYPGCDAGIRAMALSYDQRCIISGMASGSIVLFYNDFNRWHHEYQTRY

SEQ ID NO: 2761 - protein, 233 aa, Homo sapiens
MRLLPLLRTVLWAAFLGSPLRGGSSLRHVVYWNSSNPSLRREGYTVQVNVNDYLDIYCPHYNSSGVGPGAGPGPGGGAEQYVLYMVSRNGYRTCNASQGFKRWECNRPHAPHSPIKFSEKFQRYSAFSLGYEFHAGHEYYYISTPTHNLHWKCLRMKVFVCCASTSHSGEKPVPTLPQFTMGPNVKINVLEDFEGENPQVPKLEKSISGTSPKREHLPLAVGIAFFLMTFLAS

SEQ ID NO: 2762 - protein, 272 aa, Homo sapiens
MEYCRTPCTVSCNIPVVSGKECEEIIRKGGETSEMYLIQPDSSVKPYRVYCDMNTENGGWTVIQNRQDGSVDFGRKWDPYKQGFGNVATNTDGKNYCGLPGEYWLGNDKISQLTRMGPTELLIEMEDWKGDKVKAHYGGFTVQNEANKYQISVNKYRGTAGNALMDGASQLMGENRTMTIHNGMFFSTYDRDNDGWLTSDPRKQCSKEDGGGWWYNRCHAANPNGRYYWGGQYTWDMAKHGTDDGVVWMNWKGSWYSMRKMSMKIRPFFPQQ

SEQ ID NO: 2763 - protein, 901 aa, Homo sapiens
MMMVMQPEGLGAGEGRFAGGGGGGEYMEQEEDWDRDLLLDPAWEKQQRKTFTAWCNSHLRKAGTQIENIEEDFRNGLKLMLLLEVISGERLPRPDKGKMRFHKIANVNKALDFIASKGVKLVSIGAEEIVDGNLKMTLGMIWTIILRFAIQDISVEETSAKEGLLLWCQRKTAPYRNVNVQNFHTSWKDGLALCALIHRHRPDLIDYAKLRKDDPIGNLNTAFEVAEKYLDIPKMLDAEDIVNTPKPDEKAIMTYVSCFYHAFAGAEQAETAANRICKVLAVNQENEKLMEEYEKLASELLEWIRRTVPWLENRVGEPSMSAMQRKLEDFRDYRRLHKPPRIQEKCQLEINFNTLQTKLRLSHRPAFMPSEGKLVSDIANAWRGLEQVEKGYEDWLLSEIRRLQRLQHLAEKFRQKASLHEAWTRGKEEMLSQRDYDSALLQEVRALLRRHEAFESDLAAHQDRVEHIAALAQELNELDYHEAASVNSRCQAICDQWDNLGTLTQKRRDALERMEKLLETIDRLQLEFARRAAPFNNWLDGAVEDLQDVWLVHSVEETQSLLTAHDQFKATLPEADRERGAIMGIQGEIQKICQTYGLRPCSTNPYITLSPQDINTKWDMVRKLVPSCDQTLQEELARQQVNERLRRQFAAQANAIGPWIQAKVEEVGRLAAGLAGSLEEQMAGLRQQEQNIINYKTNIDRLEGDHQLLQESLVFDNKHTVYSMEHIRVGWEQLLTSIARTINEVENQVLTRDAKGLSQEQLNEFRASFNHFDRKQNGMMEPDDFRACLISMGYDLGEVEFARIMTMVDPNAAGVVTFQAFIDFMTRETAETDTTEQVVASFKILAGDKNYITPEELRRELPAKQAEYCIRRMVPYKGSGAPAGALDYVAFSSALYGESDL

SEQ ID NO: 2764 - protein, 611 aa, Homo sapiens
MSSSNVEVFIPVSQGNTNGFPATASNDLKAFTEGAVLSFHNICYRVKLKSGFLPCRKPVEKEILSNINGIMKPGLNAILGPTGGGKSSLLDVLAARKDPSGLSGDVLINGAPRPANFKCNSGYVVQDDVVMGTLTVRENLQFSAALRLATTMTNHEKNERINRVIQELGLDKVADSKVGTQFIRGVSGGERKRTSIGMELITDPSILFLDEPTTGLDSSTANAVLLLLKRMSKQGRTIIFSIHQPRYSIFKLFDSLTLLASGRLMFHGPAQEALGYFESAGYHCEAYNNPADFFLDIINGDSTAVALNREEDFKATEIIEPSKQDKPLIEKLAEIYVNSSFYKETKAELHQLSGGEKKKKITVFKEISYTTSFCHQLRWVSKRSFKNLLGNPQASIAQIIVTVVLGLVIGAIYFGLKNDSTGIQNRAGVLFFLTTNQCFSSVSAVELFVVEKKLFIHEYISGYYRVSSYFLGKLLSDLLPMRMLPSIIFTCIVYFMLGLKPKADAFFVMMFTLMMVAYSASSMALAIAAGQSVVSVATLLMTICFVFMMVCWSISQPLHLGCHGFSTSAFHDMDLRLCSIMNFWDKTSAQDSMQQETILVTMQHVLAKNIW

SEQ ID NO: 2765 - protein, 60 aa, Homo sapiens
MEADIITNLRCRLKEAEEERLKAAQYGLQLVESQNELQNQLDKCRNEMMTMTERLLDLTC

SEQ ID NO: 2766 - protein, 1178 aa, Homo sapiens
MRSKARARKLAKSDGDVVNNMYEPNRDLLASHSAEDEAEDSAMSPIPVGPPSPFPTSEDFTPKEGSPYEAPVYIPEDIPIPADFELRESSIPGAGLGVWAKRKMEAGERLGPCVVVPRAAAKETDFGWEQILTDVEVSPQEGCITKQISEDLGSEKFCVDANQAGAGSWLKYIRVACSCDDQNLTMCQISEQIYYKVIKDIEPGEELLVHVKEGVYPLGTVPPGLDEEPTFRCDECDELFQSKLDLRRHKKYTCGSVGAALYEGLAEELKPEGLGGGSGQAHECKDCERMFPNKYSLEQHMVIHTEEREYKCDQCPKAFNWKSNLIRHQMSHDSGKRFECENCVKVFTDPSNLQRHIRSQHVGARAHACPDCGKTFATSSGLKQHKHIHSTVKPFICEVCHKSYTQFSNLCRHKRMHADCRTQIKCKDCGQMFSTTSSLNKHRRFCEGKNHYTPGGIFAPGLPLTPSPMMDKAKPSPSLNHASLGFNEYFPSRPHPGSLPFSTAPPTFPALTPGFPGIFPPSLYPRPPLLPPTSLLKSPLNHTQDAKLPSPLGNPALPLVSAVSNSSQGTTAAAGPEEKFESRLEDSCVEKLKTRSSDMSDGSDFEDVNTTTGTDLDTTTGTGSDLDSDVDSDPDKDKGKGKSAEGQPKFGGGLAPPGAPNSVAEVPVFYSQHSFFPPPDEQLLTATGAAGDSIKAIASIAEKYFGPGFMGMQEKKLGSLPYHSAFPFQFLPNFPHSLYPFTDRALAHNLLVKAEPKSPRDALKVGGPSAECPFDLTTKPKDVKPILPMPKGPSAPASGEEQPLDLSIGSRARASQNGGGREPRKNHVYGERKLGAGEGLPQVCPARMPQQPPLHYAKPSPFFMDPIYSRVEKRKVTDPVGALKEKYLRPSPLLFHPQMSAIETMTEKLESFAAMKADSGSSLQPLPHHPFNFRSPPPTLSDPILRKGKERYTCRYCGKIFPRSANLTRHLRTHTGEQPYRCKYCDRSFSISSNLQRHVRNIHNKEKPFKCHLCNRCFGQQTNLDRHLKKHEHENAPVSQHPGVLTNHLGTSASSPTSESDNHALLDEKEDSYFSEIRNFIANSEMNQASTRTEKRADMQIVDGSAQCPGLASEKQEDVEEEDDDDLEEDDEDSLAGKSQDDTVSPAPEPQAAYEDEEDEEPAASLAVGFDHTRRHMQ

SEQ ID NO: 2767 - protein, 388 aa, Homo sapiens
MMTITFLPYTFSLMVTFPDVPLGIFLFCVCVIAIGVVQALIVGYAFHFPHLLSPQIQRSAHRALYRRHVLGIVLQGPALCFAAAIFSLFFVPLSYLLMVTVILLPYVSKVTGWCRDRLLGHREPSAHPVEVFSFDLHEPLSKERVEAFSDGVYAIVATLLILDICEDNVPDPKDVKERFSGSLVAALSATGPRFLAYFGSFATVGLLWFAHHSLFLHVRKATRAMGLLNTLSLAFVGGLPLAYQQTSAFARQPRDELERVRVSCTIIFLASIFQLAMWTTALLHQAETLQPSVWFGGREHVLMFAKLALYPCASLLAFASTCLLSRFSVGIFHLMQIAVPCAFLLLRLLVGLALATLRVLRGLARPEHPPPAPTGQDDPQSQLLPAPC

SEQ ID NO: 2768 - protein, 683 aa, Homo sapiens
MACEIMPLQSAHVPQVSNVSATGELLERTIRSAVEQHLFDVNNSGGQSSEDSESGTLSASSATSARQRRRQSKEQDEVRHGRDKGLINKENTPSGFNHLDDCILNTQEVEKVHKNTFGCAGERSKPKRQKSSTKLSELHDNQDGLVNMESLNSTRSHERTGPDDFEWMSDERKGNEKDGGHTQHFESPTMKIQEHPSLSDTKQQRNQDAGDQEESFVSEVPQSDLTALCDEKNWEEPIPAFSSWQRENSDSDEAHLSPQAGRLIRQLLDEDSDPMLSPRFYAYGQSRQYLDDTEVPPSPPNSHSFMRRRSSSLGSYDDEQEDLTPAQLTRRIQSLKKKIRKFEDRFEEEKKYRPSHSDKAANPEVLKWTNDLAKFRRQLKESKLKISEEDLTPRMRQRSNTLPKSFGSQLEKEDEKKQELVDKAIKPSVEATLESIQRKLQEKRAESSRPEDIKDMTKDQIANEKVALQKALLYYESIHGRPVTKNERQVMKPLYDRYRLVKQILSRANTIPIIGSPSSKRRSPLLQPIIEGETASFFKEIKEEEEGSEDDSNVKPDFMVTLKTDFSARCFLDQFEDDADGFISPMDDKIPSKCSQDTGLSNLHAASIPELLEHLQEMREEKKRIRKKLRDFEDNFFRQNGRNVQKEDRTPMAEEYSEYKHIKAKLRLLEVLISKRDTDSKSM

SEQ ID NO: 2769 - protein, 87 aa, Homo sapiens
MRLLLALLGVLLSVPGPPVLSLEASEEVELEPCLAPSLEQQEQELTVALGQPVRLCCGRAERGGHWYKEGSRLAPAGRVRGWRGRLE

SEQ ID NO: 2770 - protein, 576 aa, Homo sapiens
MKLLHVFLLFLCFHLRFCKVTYTSQEDLVEKKCLAKKYTHLSCDKVFCQPWQRCIEGTCVCKLPYQCPKNGTAVCATNRRSFPTYCQQKSLECLHPGTKFLNNGTCTAEGKFSVSLKHGNTDSEGIVEVKLVDQDKTMFICKSSWSMREANVACLDLGFQQGADTQRRFKLSDLSINSTECLHVHCRGLETSLAECTFTKRRTMGYQDFADVVCYTQKADSPMDDFFQCVNGKYISQMKACDGINDCGDQSDELCCKACQGKGFHCKSGVCIPSQYQCNGEVDCITGEDEVGCAEETEILTADMDAERRRIKSLLPKLSCGVKNRMHIRRKRIVGGKRAQLGDLPWQVAIKDASGITCGGIYIGGCWILTAAHCLRASKTHRYQIWTTVVDWIHPDLKRIVIEYVDRIIFHENYNAGTYQNDIALIEMKKDGNKKDCELPRSIPACVPWSPYLFQPNDTCIVSGWGREKDNERVFSLQWGEVKLISNCSKFYGNRFYEKEMECAGTYDGSIDACKGDSGGPLVCMDANNVTYVWGVVSWGENCGKPEFPGVYTKVANYFDWISYHVGRPFISQYNV

SEQ ID NO: 2771 - protein, 532 aa, Homo sapiens
MELENIVANSLLLKARQGGYGKKSGRSKKWKEILTLPPVSQCSELRHSIEKDYSSLCDKQPIGRRLFRQFCDTKPTLKRHIEFLDAVAEYEVADDEDRSDCGLSILDRFFNDKLAAPLPEIPPDVVTECRLGLKEENPSKKAFEECTRVAHNYLRGEPFEEYQESSYFSQFLQWKWLERQPVTKNTFRHYRVLGKGGFGEVCACQVRATGKMYACKKLQKKRIKKRKGEAMALNEKRILEKVQSRFVVSLAYAYETKDALCLVLTIMNGGDLKFHIYNLGNPGFDEQRAVFYAAELCCGLEDLQRERIVYRDLKPENILLDDRGHIRISDLGLATEIPEGQRVRGRVGTVGYMAPEVVNNEKYTFSPDWWGLGCLIYEMIQGHSPFKKYKEKVKWEEVDQRIKNDTEEYSEKFSEDAKSICRMLLTKNPSKRLGCRGEGAAGVKQHPVFKDINFRRLEANMLEPPFCPDPHAVYCKDVLDIEQFSVVKGIYLDTADEDFYARFATGCVSIPWQNEGCLTMVPSEKEVEPKQC

SEQ ID NO: 2772 - protein, 283 aa, Homo sapiens
MPHSSLHPSIPCPRGHGAQKAALVLLSACLVTLWGLGEPPEHTLRYLVLHLASLQLGLLLNGVCSLAEELRHIHSRYRGSYWRTVRACLGCPLRRGALLLLSIYFYYSLPNAVGPPFTWMLALLGLSQALNILLGLKGLAPAEISAVCEKGNFNVAHGLAWSYYIGYLRLILPELQARIRTYNQHYNNLLRGAVSQRLYILLPLDCGVPDNLSMADPNIRFLDKLPQQTGDHAGIKDRVYSNSIYELLENGQRNLQMTAASRCPRRFSGTCGRRKRKRLLWAA

SEQ ID NO: 2773 - protein, 158 aa, Homo sapiens
MEADIITNLRCRLKEAEEERLKAAQYGLQLVESQNELQNQLDKCRNEMMTMTESYEQEKYTLQREVELKSRMLESLSCECEAIKQQQKMHLEKLEEQLSRSHGQEVNELKTKIEKLKVELDEARLSEKQLKHQVDHQKELLSCKSEELRVMSERVQES

SEQ ID NO: 2774 - protein, 2537 aa, Homo sapiens
MEDFRGIAEESFPSFLTNSLFGNSGILENVTLSSNLGLPVAVSTLARDRSSTDNRYPDIQASYLVEGRFSVPSGSSPGSQSDAEPRERLQLSFQDDDSISRKKSYVESQRLSNALSKQSALQMETAGPEEEPAGATESLQGQDLFNRASPLEQAQDSPIDFHLQSWMNNKEPKIVVLDAGKHFEDKTLKSDLSHTSLLENEKLILPTSLEDSSDDDIDDEMFYDDHLEAYFEQLAIPGMIYEDLEGPEPPEKGFKLPTNGLRQANENGSLNCKFQSENNSSLISLDSHSSETTHKESEESQVICLPGTSNSIGTGDSRRYTDGMLPFSSGTWGTEKEIENLKGIVPDLNSECASKDVLVKTLRAIDVKLNSDNFHDANANRGGFDLTDPVKQGAECPHQNKTVLHMDGCLDTETPTVSIQENVDVASLKPISDSGINFTDAIWSPTCERRTCECHESIEKNKDKTDLPQSVVYQNEEGRWVTDLAYYTSFNSKQNLNVSLSDEMNEDFRSGSEAFDLIAQDEEEFNKEHQFIQEENIDAHNTSVALGDTSWGATINYSLLRKSRSTSDLDKDDASYLRLSLGEFFAQRSEALGCLGGGNNVKRPSFGYFIRSPEKREPIALIRKSDVSRGNLEKEMAHLNHDLYSGDLNEQSQAQLSEGSITLQVEAVESTSQVDENDVTLTADKGKTEDTFFMSNKPQRYKDKLPDSGDSMLRISTIASAIAEASVNTDPSQLAAMIKALSNKTRDKTFQEDEKQKDYSHVRHFLPNDLEKSNGSNALDMEKYLKKTEVSRYESALENFSRASMSDTWDLSLPKEQTTQDIHPVDLSATSVSVRAPEENTAAIVYVENGESENQESFRTINSSNSVTNRENNSAVVDVKTCSIDNKLQDVGNDEKATSISTPSDSYSSVRNPRITSLCLLKDCEEIRDNRENQRQNECVSEISNSEKHVTFENHRIVSPKNSDLKNTSPEHGGRGSEDEQESFRPSTSPLSHSSPSEISGTSSSGCALESFGSAAQQQQPPCEQELSPLVCSPAGVSRLTYVSEPESSYPTTATDDALEDRKSDITSELSTTIIQGSPAALEERAMEKLREKVPFQNRGKGTLSSIIQNNSDTRKATETTSLSSKPEYVKPDFRWSKDPSSKSGNLLETSEVGWTSNPEELDPIRLALLGKSGLSCQVGSATSHPVSCQEPIDEDQRISPKDKSTAGREFSGQVSHQTTSENQCTPIPSSTVHSSVADMQNMPAAVHALLTQPSLSAAPFAQRYLGTLPSTGSTTLPQCHAGNATVCGFSGGLPYPAVAGEPVQNSVAVGICLGSNIGSGWMGTSSLCNPYSNTLNQNLLSTTKPFPVPSVGTNCGIEPWDSGVTSGLGSVRVPEELKLPHACCVGIASQTLLSVLNPTDRWLQVSIGVLSISVNGEKVDLSTYRCLVFKNKAIIRPHATEEIKVLFIPSSPGVFRCTFSVASWPCSTDAETIVQAEALASTVTLTAIAESPVIEVETEKKDVLDFGDLTYGGWKALPLKLINRTHATVPIRLIINANAVAWRCFTFSKESVRAPVEVAPCADVVTRLAGPSVVNHMMPASYDGQDPEFLMIWVLFHSPKKQISSSDILDSAEEFSAKVDIEVDSPNPTPVLRSVSLRARAGIARIHAPRDLQTMHFLAKVASSRKQHLPLKNAGNIEVYLDIKVPEQGSHFSVDPKNLLLKPGEEHEVIVSFTPKDPEACEERILKIFVQPFGPQYEVVLKGEVISSGSKPLSPGPCLDIPSILSNKQFLAWGGVPLGRTQLQKLALRNNSASTTQHLRLLIRGQDQDCFQLQNTFGSEQRLTSNCEIRIHPKEDIFISVLFAPTRLSCMLARLEIKQLGNRSQPGIKFTIPLSGYGGTSNLILEGVKKLSDSYMVTVNGLVPGKESKIVFSVRNTGSRAAFVKAVGFKDSQKKVLLDPKVLRIFPDKFVLKERTQENVTLIYNPSDRGINNKTATELSTVYLFGGDEISRQQYRRALLHKPEMIKQILPEHSVLQNINFVEAFQDELLVTEVYDLPQRPNDVQLFYGSMCKIILSVIGEFRDCISSREFLQPSSKASLESTSDLGASGKHGGNVSLDVLPVKGPQGSPLLSRAARPPLDQLASEEPWTVLPEHLILVAPSPCDMAKTGRFQIVNNSVRLLRFELCWPAHCLTVTPQHGCVAPESKLQILVSPNSSLSTKQSMFPWSGLIYIHCDDGQKKIVKVQIREDLTQVELLTRLTSKPFGILSPVSEPSVSHLVKPMTKPPSTKVEIRNKSITFPTTEPGETSESCLELENHGTTDVKWHLSSLAPPYVKGVDESGDVFRATYAAFRCSPISGLLESHGIQKVSITFLPRGRGDYAQFWDVECHPLKEPHMKHTLRFQLSGQSIEAENEPENACLSTDSLIKIDHLVKPRRQAVSEASARIPEQLDVTARGVYAPEDVYRFRPTSVGESRTLKVNLRNNSFITHSLKFLSPREPFYVKHSKYSLRAQHYINMPVQFKPKSAGKFEALLVIQTDEGKSIAIRLIGEALGKN

SEQ ID NO: 2775 - protein, 874 aa, Homo sapiens
MANLKIELSKLDSEAWPGALDIEKEKLMLINEKEELLKELQFVTPQKRTQDELERLEAERQRLEEELLSVRGTPSRALAERLRLEERRKELLQKLEETTKLTTYLHSQLKSLSASTLSMSSGSSLGSLASSRGSLNTSSRGSLNSLSSTELYYSSQSDQIDVDYQYKLDFLLQEKSGYIPSGPITTIHENEVVKSPSQPGQSGLCGVAAAATGHTPPLAEAPKSVASLSSRSSLSSLSPPGSPLVLEGTFPMSSSHDASLHQFTADFEDCELSSHFADISLIENQILLDSDSGGASQSLSEDKDLNECAREPLYEGTADVEKSLPKRRVIHLLGEKTTCVSAAVSDESVAGDSGVYEAFVKQPSEMEDVTYSEEDVAIVETAQVQIGLRYNAKSSSFMVIIAQLRNLHAFLIPHTSKVYFRVAVLPSSTDVSCLFRTKVHPPTESILFNDVFRVAISQTALQQKTLRVDLCSVSKHRREECLAGTQISLADLPFSSEVFTLWYNLLPSKQMPCKKNEENEDSVFQPNQPLVDSIDLDAVSALLARTSAELLAVEQELAQEEEEESGQEEPRGPDGDWLTMLREASDEIVAEKEAEVKLPEDSSCTEDLSSCTSVPEMNEDGNRKESNCAKDLRSQPPTRIPTLVDKETNTDEAANDNMAVRPKERSSLSSRQHPFVRSSVIVRSQTFSPGERNQYICRLNRSDSDSSTLAKKSLFVRNSTERRSLRVKRTVCQSVLRRTTQECPVRTSLDLELDLQASLTRQSRLNDELQALRDLRQKLEELKAQGETDLPPGVLEDERFQRLLKQAEKQAEQSKEEQKQGLNAEKLMRQVSKDVCRLREQSQKVPRQVQSFREKIAYFTRAKISIPSLPADDV

SEQ ID NO: 2776 - protein, 94 aa, Homo sapiens
MTAEGDAPELPEERELMTNCSNMSLRKVPADLTPATTTLDLSYNLLFQLQSSDFHSVSKLRVLILCHNRIQQLDLKTFEFNKELRYLDLSNNRL

SEQ ID NO: 2777 - protein, 77 aa, Homo sapiens
MLQCLVTGHPRPQVRWTKTAGSASDKFQETSVFNETLRIERIARTQGGRYYCKAENGVGVPAIKSIRVDVQYLDEPM

SEQ ID NO: 2778 - protein, 369 aa, Homo sapiens
MSVKWTSVILLIQLSFCFSSGNCGKVLVWAAEYSHWMNIKTILDELIQRGHEVTVLASSASILFDPNNSSALKIEIYPTSLTKTELENFIMQQIKRWSDLPKDTFWLYFSQVQEIMSIFGDITRKFCKDVVSNKKFMKKVQESRFDVIFADAIFPCSELLAELFNIPFVYSLSFSPGYTFEKHSGGFIFPPSYVPVVMSELTDQMTFMERVKNMIYVLYFDFWFEIFDMKKWDQFYSEVLGRPTTLSETMGKADVWLIRNSWNFQFPYPLLPNVDFVGGLHCKPAKPLPKEMEDFVQSSGENGVVVFSLGSMVSNMTEERANVIASALAQIPQKVLWRFDGNKPDTLGLNTRLYKWIPQNDLLDIKRML

SEQ ID NO: 2779 - protein, 921 aa, Homo sapiens
MEERGGVYAGRGLELVFWEWEVVTVMSVFSRSRIKCVPADVYSFIYSCHTTGLSLNNDRLYKLTYSTEVLLDRGKGKLQDSVGYRISSNVDVALLWRNPDGDDDQLIQITMKDVNVENVNQQRGEKSIFKGKSPSKIMGKENLEALQRPTLLHLIHGKVKEFYSYQNEAVAIENIKRGLASLFQTQLSSGTTNEVDISGNCKVTYQAHQDKVIKIKALDSCKIARSGFTTPNQVLGVSSKATSVTTYKIEDSFVIAVLAEETHNFGLNFLQTIKGKIVSKQKLELKTTEAGPRLMSGKQAAAIIKAVDSKYTAIPIVGQVFQSHCKGCPSLSELWRSTRKYLQPDNLSKAEAVRNFLAFIQHLRTAKKEEILQILKMENKEVLPQLVDAVTSAQTSDSLEAILDFLDFKSDSSIILQERFLYACGFASHPNEELLRALISKFKGSIGSSDIRETVMIITGTLVRKLCQNEGCKLKAVVEAKKLILGGLEKAEKKEDTRMYLLALKNALLPEGIPSLLKYAEAGEGPISHLATTALQRYDLPFITDEVKKTLNRIYHQNRKVHEKTVRTAAAAIILNNNPSYMDVKNILLSIGELPQEMNKYMLAIVQDILRFEMPASKIVRRVLKEMVAHNYDRFSRSGSSSAYTGYIERSPRSASTYSLDILYSGSGILRRSNLNIFQYIGKAGLHGSQVVIEAQGLEALIAATPDEGEENLDSYAGMSAILFDVQLRPVTFFNGYSDLMSKMLSASGDPISVVKGLILLIDHSQELQLQSGLKANIEVQGGLAIDISGAMEFSLWYRESKTRVKNRVTVVITTDITVDSSFVKAGLETSTETEAGLEFISTVQFSQYPFLVCMQMDKDEAPFRQFEKKYERLSTGRGYVSQKRKESVLAGCEFPLHQENSEMCKVVFAPQPDSTSSGWF

SEQ ID NO: 2780 - protein, 215 aa, Homo sapiens
MPGEATETVPATEQELPQSQAETGSGTASDSGESVPGIEEQDSTQTTTQKAWLVAAAEIDEEPVGKAKQSRSEKRARKAMSKLGLLQVTGVTRVTIWKSKNILFVITKLDVYKSPASDAYIVFGEAKIQDLSQQAQLAAAEKFRVQGEAVGNIQENTQTPTVQEESEEEEVDETGVEVKDVKLVMSQANVSRAKAVRALKNNSNDIVNAIMELTV

SEQ ID NO: 2781 - protein, 1826 aa, Homo sapiens
MGDSKVKVAVRIRPMNRRETDLHTKCVVDVDANKVILNPVNTNLSKGDARGQPKVFAYDHCFWSMDESVKEKYAGQDIVFKCLGENILQNAFDGYNACIFAYGQTGSGKSYTMMGTADQPGLIPRLCSGLFERTQKEENEEQSFKVEVSYMEIYNEKVRDLLDPKGSRQTLKVREHSVLGPYVDGLSKLAVTSYKDIESLMSEGNKSRTVAATNMNEESSRSHAVFKITLTHTLYDVKSGTSGEKVGKLSLVDLAGSERATKTGAAGDRLKEGSNINKSLTTLGLVISALADQSAGKNKNKFVPYRDSVLTWLLKDSLGGNSKTAMVATVSPAADNYDETLSTLRYADRAKHIVNHAVVNEDPNARIIRDLREEVEKLREQLTKAEAMKSPELKDRLEESEKLIQEMTVTWEEKLRKTEEIAQERQKQLESLGISLQSSGIKVGDDKCFLVNLNADPALNELLVYYLKEHTLIGSANSQDIQLCGMGILPEHCIIDITSEGQVMLTPQKNTRTFVNGSSVSSPIQLHHGDRILWGNNHFFRLNLPKKKKKAEREDEDQDPSMKNENSSEQLDVDGDSSSEVSSEVNFNYEYAQMEVTMKALGSNDPMQSILNSLEQQHEEEKRSALERQRLMYEHELEQLRRRLSPEKQNCRSMDRFSFHSPSAQQRLRQWAEEREATLNNSLMRLREQIVKANLLVREANYIAEELDKRTEYKVTLQIPASSLDANRKRGSLLSEPAIQVRRKGKGKQIWSLEKLDNRLLDMRDLYQEWKECEEDNPVIRSYFKRADPFYDEQENHSLIGVANVFLESLFYDVKLQYAVPIINQKGEVAGRLHVEVMRLSGDVGERIAGGDEVAEVSFEKETQENKLVCMVKILQATGLPQHLSHFVFCKYSFWDQQEPVIVAPEVDTSSSSVSKEPHCMVVFDHCNEFSVNITEDFIEHLSEGALAIEVYGHKINDPRKNPALWDLGIIQAKTRSLRDRWSEVTRKLEFWVQILEQNENGEYCPVEVISAKDVPTGGIFQLRQGQSRRVQVEVKSVQESGTLPLMEECILSVGIGCVKVRPLRAPRTHETFHEEEEDMDSYQDRDLERLRRKWLNALTKRQEYLDQQLQKLVSKRDKTEDDADREAQLLEMRLTLTEERNAVMVPSAGSGIPGAPAEWTPVPGMETHIPVIFLDLNADDFSSQDNLDDPEAGGWDATLTGEEEEEFFELQIVKQHDGEVKAEASWDSAVHGCPQLSRGTPVDERLFLIVRVTVQLSHPADMQLVLRKRICVNVHGRQGFAQSLLKKMSHRSSIPGCGVTFEIVSNIPEDAQGVEEREALARMAANVENPASADSEAYIEKYLRSVLAVENLLTLDRLRQEVAVKEQLTGKGKLSRRSISSPNVNRLSGSRQDLIPSYSLGSNKGRWESQQDVSQTTVSRGIAPAPALSVSPQNNHSPDPGLSNLAASYLNPVKSFVPQMPKLLKSLFPVRDEKRGKRPSPLAHQPVPRIMVQSASPDIRVTRMEEAQPEMGPDVLVQTMGAPALKICDKPAKVPSPPPVIAVTAVTPAPEAQDGPPSPLSEASSGYFSHSVSTATLSDALGPGLDAAAPPGSMPTAPEAEPEAPISHPPPPTAVPAEEPPGPQQLVSPGRERPDLEAPAPGSPFRVRRVRASELRSFSRMLAGDPGCSPGAEGNAPAPGAGGQALASDSEEADEVPEWLREGEFVTVGAHKTGVVRYVGPADFQEGTWVGVELDLPSGKNDGSIGGKQYFRCNPGYGLLVRPSRVRRATGPVRRRSTGLRLGAPEARRSATLSGSATNLASLTAALAKADRSHKNPENRKSWAS

SEQ ID NO: 2782 - protein, 402 aa, Homo sapiens
MDSSAAPTNASNCTDALAYSSCSPAPSPGSWVNLSHLDGNLSDPCGPNRTDLGGRDSLCPPTGSPSMITAITIMALYSIVCVVGLFGNFLVMYVIVRYTKMKTATNIYIFNLALADALATSTLPFQSVNYLMGTWPFGTILCKIVISIDYYNMFTSIFTLCTMSVDRYIAVCHPVKALDFRTPRNAKIINVCNWILSSAIGLPVMFMATTKYRQGSIDCTLTFSHPTWYWENLLKICVFIFAFIMPVLIITVCYGLMILRLKSVRMLSGSKEKDRNLRRITRMVLVVVAVFIVCWTPIHIYVIIKALVTIPETTFQTVSWHFCIALGYTNSCLNPVLYAFLDENFKRCFREFCIPTSSNIEQQNSTRIRQNTRDHPSTANTVDRTNHQIRDPISNLPRVSVF

SEQ ID NO: 2783 - protein, 1326 aa, Homo sapiens
MNKMALASFMKGRTVIGTPDEETMDIELPKKYHEMVGVIFSDTFSYRLKFNWGYRIPVIKEHSEYTEHCWAMHGEIFCYLAKYWLKGFVAFQAAINAAIIEVTTNHSVMEELTSVIGINMKIPPFISKGEIMNEWFHFTCLVSFSSFIYFASLNVARERGKFKKLMTVMGLRESAFWLSWGLTYICFIFIMSIFMALVITSIPIVFHTGFMVIFTLYSLYGLSLIALAFLMSVLIRKPMLAGLAGFLFTVFWGCLGFTVLYRQLPLSLGWVLSLLSPFAFTAGMAQITHLDNYLSGVIFPDPSGDSYKMIATFFILAFDTLFYLIFTLYFERVLPDKDGHGDSPLFFLKSSFWSKHQNTHHEIFENEINPEHSSDDSFEPVSPEFHGKEAIRIRNVIKEYNGKTGKVEALQGIFFDIYEGQITAILGHNGAGKSTLLNILSGLSVSTEGSATIYNTQLSEITDMEEIRKNIGFCPQFNFQFDFLTVRENLRVFAKIKGIQPKEVEQEVKRIIMELDMQSIQDIIAKKLSGGQKRKLTLGIAILGDPQVLLLDEPTAGLDPFSRHRVWSLLKEHKVDRLILFSTQFMDEADILADRKVFLSNGKLKCAGSSLFLKRKWGIGYHLSLHRNEMCDTEKITSLIKQHIPDAKLTTESEEKLVYSLPLEKTNKFPDLYSDLDKCSDQGIRNYAVSVTSLNEVFLNLEGKSAIDEPDFDIGKQEKIHVTRNTGDESEMEQVLCSLPETRKAVSSAALWRRQIYAVATLRFLKLRRERRALLCLLLVLGIAFIPIILEKIMYKVTRETHCWEFSPSMYFLSLEQIPKTPLTSLLIVNNTGSNIEDLVHSLKCQDIVLEIDDFRNRNGSDDPSYNGAIIVSGDQKDYRFSVACNTKKLNCFPVLMGIVSNALMGIFNFTELIQMESTSFSRDDIVLDLGFIDGSIFLLLITNCVSPFIGMSSISDYKKNVQSQLWISGLWPSAYWCGQALVDIPLYFLILFSIHLIYYFIFLGFQLSWELMFVLVVCIIGCAVSLIFLTYVLSFIFRKWRKNNGFWSFGFFIILICVSTIMVSTQYEKLNLILCMIFIPSFTLLGYVMLLIQLDFMRNLDSLDNRINEVNKTILLTTLIPYLQSVIFLFVIRCLEMKYGNEIMNKDPVFRISPRSRETHPNPEEPEEEDEDVQAERVQAANALTAPNLEEEPVITASCLHKEYYETKKSCFSTRKKKIAIRNVSFCVKKGEVLGLLGHNGAGKSTSIKMITGCTKPTAGVVVLQGSRASVRQQHDNSLKFLGYCPQENSLWPKLTMKEHLELYAAVKGLGKEDAALSISRCALC

SEQ ID NO: 2784 - protein, 945 aa, Homo sapiens
MSERAADDVRGEPRRAAAAAGGAAAAAARQQQQQQQQQQPPPPQPQRQQHPPPPPRRTRPEDGGPGAASTSAAAMATVGERRPLPSPEVMLGQSWNLWVEASKLPGKDGTELDESFKEFGKNREVMGLCREDMPIFGFCPAHDDFYLVVCNDCNQVVKPQAFQSHYERRHSSSSKPPLAVPPTSVFSFFPSLSKSKGGSASGSNRSSSGGVLSASSSSSKLLKSPKEKLQLRGNTRPMHPIQQSRVPHGRIMTPSVKVEKIHPKMDGTLLKSAVGPTCPATVSSLVKPGLNCPSIPKPTLPSPGQILNGKGLPAPPTLEKKPEDNSNNRKFLNKRLSEREFDPDIHCGVIDLDTKKPCTRSLTCKTHSLTQRRAVQGRRKRFDVLLAEHKNKTREKELIRHPDSQQPPQPLRDPHPAPPRTSQEPHQNPHGVIPSESKPFVASKPKPHTPSLPRPPGCPAQQGGSAPIDPPPVHESPHPPLPATEPASRLSSEEGEGDDKEESVEKLDCHYSGHHPQPASFCTFGSRQIGRGYYVFDSRWNRLRCALNLMVEKHLNAQLWKKIPPVPSTTSPISTRIPHRTNSVPTSQCGVSYLAAATVSTSPVLLSSTCISPNSKSVPAHGTTLNAQPAASGAMDPVCSMQSRQVSSSSSSPSTPSGLSSVPSSPMSRKPQKLKSSKSLRPKESSGNSTNCQNASSSTSGGSGKKRKNSSPLLVHSSSSSSSSSSSSHSMESFRKNCVAHSGPPYPSTVTSSHSIGLNCVTNKANAVNVRHDQSGRGPPTGSPAESIKRMSVMVNSSDSTLSLGPFIHQSNELPVNSHGSFSHSHTPLDKLIGKKRKCSPSSSSINNSSSKPTKVAKVPAVNNVHMKHTGTIPGAQGLMNSSLLHQDISSPCLRTGISATSPQSPDLKSKGTSLTAENSTGRNNADTFEDKLHLHSALWTPRCL

SEQ ID NO: 2785 - protein, 747 aa, Homo sapiens
MEGSKTPLQSSPSAQELKAPLERRHSSSSKPPLAVPPTSVFSFFPSLSKSKGGSASGSNRSSSGGVLSASSSSSKLLKSPKEKLQLRGNTRPMHPIQQSRVPHGRIMTPSVKVEKIHPKMDGTLLKSAVGPTCPATVSSLVKPGLNCPSIPKPTLPSPGQILNGKGLPAPPTLEKKPEDNSNNRKFLNKRLSEREFDPDIHCGVIDLDTKKPCTRSLTCKTHSLTQRRAVQGRRKRFDVLLAEHKNKTREKELIRHPDSQQPPQPLRDPHPAPPRTSQEPHQNPHGVIPSESKPFVASKPKPHTPSLPRPPGCPAQQGGSAPIDPPPVHESPHPPLPATEPASRLSSEEGEGDDKEESVEKLDCHYSGHHPQPASFCTFGSRQIGRGYYVFDSRWNRLRCALNLMVEKHLNAQLWKKIPPVPSTTSPISTRIPHRTNSVPTSQCGVSYLAAATVSTSPVLLSSTCISPNSKSVPAHGTTLNAQPAASGAMDPVCSMQSRQVSSSSSSPSTPSGLSSVPSSPMSRKPQKLKSSKSLRPKESSGNSTNCQNASSSTSGGSGKKRKNSSPLLVHSSSSSSSSSSSSHSMESFRKNCVAHSGPPYPSTVTSSHSIGLNCVTNKANAVNVRHDQSGRGPPTGSPAESIKRMSVMVNSSDSTLSLGPFIHQSNELPVNSHGSFSHSHTPLDKLIGKKRKCSPSSSSINNSSSKPTKVAKVPAVNNVHMKHTGTIPGAQGLMNSSLLHQPKARP

SEQ ID NO: 2786 - protein, 215 aa, Homo sapiens
MNFLLSWVHWSLALLLYLHHAKWSQAAPMAEGGGQNHHEVVKFMDVYQRSYCHPIETLVDIFQEYPDEIEYIFKPSCVPLMRCGGCCNDEGLECVPTEESNITMQIMRIKPHQGQHIGEMSFLQHNKCECRPKKDRARQEKKSVRGKGKGQKRKRKKSRYKSWSVPCGPCSERRKHLFVQDPQTCKCSCKNTDSRCKARQLELNERTCRCDKPRR

SEQ ID NO: 2787 - protein, 272 aa, Homo sapiens
MPGGAGAARLCLLAFALQPLRPRAAREPGWTRGSEEGSPKLQHELIIPQWKTSESPVREKHPLKAELRVMAEGRELILDLEKNEQLFAPSYTETHYTSSGNPQTTTRKLEDHCFYHGTVRETELSSVTLSTCRGIRGLITVSSNLSYVIEPLPDSKGQHLIYRSEHLKPPPGNCGFEHSKPTTRDWALQFTQQTKKRPRRMKREDLNSMKYVELYLVADYLEFQKNRRDQDATKHKLIEIANYVDKVRPVLPILEHPDCSRGLGSVDPREHV

SEQ ID NO: 2788 - protein, 147 aa, Homo sapiens
MSVTKSTEGPQGAVAIKLDLMSPPESAKKLENKDSTFLDESPSESAGLKKTKGITVFQALIHLVKGNMGTGILGLPLAVKNAGILMGPLSLLVMGFIACHCMHILVKCAQRFCKRLNKPFMDYGDTVMHGLEANPNAWLQNHAHWGR

SEQ ID NO: 2789 - protein, 55 aa, Homo sapiens
MDLITVHLLYGCPSLLHGPTLAGTVLGAAGDPRPWPVHASQPPYTGHPYVLPFRA

SEQ ID NO: 2790 - protein, 955 aa, Homo sapiens
MPGGAGAARLCLLAFALQPLRPRAAREPGWTRGSEEGSPKLQHELIIPQWKTSESPVREKHPLKAELRVMAEGRELILDLEKNEQLFAPSYTETHYTSSGNPQTTTRKLEDHCFYHGTVRETELSSVTLSTCRGIRGLITVSSNLSYVIEPLPDSKGQHLIYRSEHLKPPPGNCGFEHSKPTTRDWALQFTQQTKKRPRRMKREDLNSMKYVELYLVADYLEFQKNRRDQDATKHKLIEIANYVDKFYRSLNIRIALVGLEVWTHGNMCEVSENPYSTLWSFLSWRRKLLAQKYHDNAQLITGMSFHGTTIGLAPLMAMCSVYQSGGVNMDHSENAIGVAATMAHEMGHNFGMTHDSADCCSASAADGGCIMAAATGHPFPKVFNGCNRRELDRYLQSGGGMCLSNMPDTRMLYGGRRCGNGYLEDGEECDCGEEEECNNPCCNASNCTLRPGAECAHGSCCHQCKLLAPGTLCREQARQCDLPEFCTGKSPHCPTNFYQMDGTPCEGGQAYCYNGMCLTYQEQCQQLWGPGARPAPDLCFEKVNVAGDTFGNCGKDMNGEHRKCNMRDAKCGKIQCQSSEARPLESNAVPIDTTIIMNGRQIQCRGTHVYRGPEEEGDMLDPGLVMTGTKCGYNHICFEGQCRNTSFFETEGCGKKCNGHGVCNNNQNCHCLPGWAPPFCNTPGHGGSIDSGPMPPESVGPVVAGVLVAILVLAVLMLMYYCCRQNNKLGQLKPSALPSKLRQQFSCPFRVSQNSGTGHANPTFKLQTPQGKRKVINTPEILRKPSQPPPRPPPDYLRGGSPPAPLPAHLSRAARNSPGPGSQIERTESSRRPPPSRPIPPAPNCIVSQDFSRPRPPQKALPANPVPGRRSLPRPGGASPLRPPGAGPQQSRPLAALAPKVSPREALKVKAGTRGLQGGRCRVEKTKQFMLLVVWTELPEQKPRAKHSCFLVPA

SEQ ID NO: 2791 - protein, 201 aa, Homo sapiens
MAAAGAGPGQEAGAGPGPGAVANATGAEEGEMKPVAAGAAAPPGEGISAAPTVEPSSGEAEGGKETTLQCQTGRSNGHSENRVGELPLFEPLPGPTLTQEGAGDTSEVMDTQAGSVDEENGRQLGEVELQCGICTKWFTADTFGIDTSSCLPFMTNYSFHCNVCHHSGNTYFLRKQANLKEMCLSALANLTWQSRTQDEHP

SEQ ID NO: 2792 - protein, 499 aa, Homo sapiens
MDAMKRGLCCVLLLCGAVFVSPSQEIHARFRRGARSYQVICRDEKTQMIYQQHQSWLRPVLRSNRVEYCWCNSGRAQCHSVPVKSCSEPRCFNGGTCQQALYFSDFVCQCPEGFAGKCCEIDSKPWCYVFKAGKYSSEFCSTPACSEGNSDCYFGNGSAYRGTHSLTESGASCLPWNSMILIGKVYTAQNPSAQALGLGKHNYCRNPDGDAKPWCHVLKNRRLTWEYCDVPSCSTCGLRQYSQPQFRIKGGLFADIASHPWQAAIFAKHRRSPGERFLCGGILISSCWILSAAHCFQERFPPHHLTVILGRTYRVVPGEEEQKFEVEKYIVHKEFDDDTYDNDIALLQLKSDSSRCAQESSVVRTVCLPPADLQLPDWTECELSGYGKHEALSPFYSERLKEAHVRLYPSSRCTSQHLLNRTVTDNMLCAGDTRSGGPQANLHDACQGDSGGPLVCLNDGRMTLVGIISWGLGCGQKDVPGVYTKVTNYLDWIRDNMRP

SEQ ID NO: 2793 - protein, 522 aa, Homo sapiens
MWGRLWPLLLSILTATAVPGPSLRRPSRELDATPRMTIPYEELSGTRHFKGQAQNYSTLLLEEASARLLVGARGALFSLSANDIGDGAHKEIHWEASPEMQSKCHQKGKNNQTECFNHVRFLQRLNSTHLYACGTHAFQPLCAAIDAEAFTLPTSFEEGKEKCPYDPARGFTGLIIDGGLYTATRYEFRSIPDIRRSRHPHSLRTEETPMHWLNDAEFVFSVLVRESKASAVGDDDKVYYFFTERATEEGSGSFTQSRSSHRVARVARVCKGDLGGKKILQKKWTSFLKARLICHIPLYETLRGVCSLDAETSSRTHFYAAFTLSTQWKTLEASAICRYDLAEIQAVFAGPYMEYQDGSRRWGRYEGGVPEPRPGSCITDSLRSQGYNSSQDLPSLVLDFVKLHPLMARPVVPTRGRPLLLKRNIRYTHLTGTPVTTPAGPTYDLLFLGTADGWIHKAVVLGSGMHIIEETQVFRESQSVENLVISLLQHSLYVGAPSGVIQLPLSSCSRYRSCYDCILARD

SEQ ID NO: 2794 - protein, 291 aa, Homo sapiens
MSALNWKPFVYGGLASITAECGTFPIDLTKTRLQIQGQTNDAKFKEIRYRGMLHALVRIGREEGLKALYSGIAPAMLRQASYGTIKIGTYQSLKRLFIERPEDETLPINVICGILSGVISSTIANPTDVLKIRMQAQSNTIQGGMIGNFMNIYQQEGTRGLWKGVSLTAQRAAIVVGVELPVYDITKKHLILSGLMGDTVYTHFLSSFTCGLAGALASNPVDVVRTRMMNQRVLRDGRCSGYTGTLDCLLQTWKNEGFFALYKGFWPNWLRLGPWNIIFFVTYEQLKKLDL

SEQ ID NO: 2795 - protein, 743 aa, Homo sapiens
MGDSKVKVAVRIRPMNRRETDLHTKCVVDVDANKVILNPVNTNLSKGDARGQPKVFAYDHCFWSMDESVKEKYAGQDIVFKCLGENILQNAFDGYNACIFAYGQTGSGKSYTMMGTADQPGLIPRLCSGLFERTQKEENEEQSFKVEVSYMEIYNEKVRDLLDPKGSRQTLKVREHSVLGPYVDGLSKLAVTSYKDIESLMSEGNKSRTVAATNMNEESSRSHAVFKITLTHTLYDVKSGTSGEKVGKLSLVDLAGSERATKTGAAGDRLKEGSNINKSLTTLGLVISALADQSAGKNKNKFVPYRDSVLTWLLKDSLGGNSKTAMVATVSPAADNYDETLSTLRYADRAKHIVNHAVVNEDPNARIIRDLREEVEKLREQLTKAEAMKSPELKDRLEESEKLIQEMTVTWEEKLRKTEEIAQERQKQLESLGISLQSSGIKVGDDKCFLVNLNADPALNELLVYYLKEHTLIGSANSQDIQLCGMGILPEHCIIDITSEGQVMLTPQKNTRTFVNGSSVSSPIQLHHGDRILWGNNHFFRLNLPKKKKKAEREDEDQDPSMKNENSSEQLDVDGDSSSEVSSEVNFNYEYAQMEVTMKALGSNDPMQSILNSLEQQHEEEKRSALERQRLMYEHELEQLRRRLSPEKQNCRSMDRFSFHSPSAQQRLRQWAEEREATLNNSLMRLREQIVKANLLVREANYIAEELDKRTEYKVTLQIPASSLDANRKVRLPFLEKNKDLIG

SEQ ID NO: 2796 - protein, 186 aa, Homo sapiens
MGKEIQLKPKANVSSYVHFLLNYRNKFKEQQPNTYVGFKEFSRKCSEKWRSISKHEKAKYEALAKLDKARYQEEMMNYVGKRKKRRKRDPQEPRRPPSSFLLFCQDHYAQLKRENPNWSVVQVAKATGKMWSTATDLEKHPYEQRVALLRAKYFEELELYRKQCNARKKYRMSARNRCRGKRVRQS

SEQ ID NO: 2797 - protein, 237 aa, Homo sapiens
QERRPRGRRRGQTPFYIRIPKYGFNEGHSFRRQYKPLSLNRLQYLIDLGRVDPSQPIDLTQLVNGRGVTIQPLKRDYGVQLVEEGADTFTAKVNIEVQLASELAIAAIEKNGGVVTTAFYDPRSLDIVCKPVPFFLRGQPIPKRMLPPEELVPYYTDAKNRGYLADPAKFPEARLELARKYGYILPDITKDELFKMLCTRKDPRQIFFGLAPGWVVNMADKKILKPTDENLLKYYTS

SEQ ID NO: 2798 - protein, 432 aa, Homo sapiens
MAAQPPRPVGERSMGSSREAARAPARSPAWASTQASTPGAALAVQRESPESGLQKHYSNLCMEKSQKINPFILHILQEVDEEIKKGLAAGITLNIAGNNRLVPVERVTGEDFWILSKILKNCLYINGLDVGYNLLCDVGAYYAAKLLQKQLNLIYLNLMFNDIGPEGGELIAKVLHKNRTLKYLRMTGNKIENKGGMFFAAMLQINSSLEKLDLGDCDLEESTVHVGRMLKENHCLVALHMCKHDIKNSGIQQLCDALYLNSSLRYLDVSCNKITHDGMVYLADVLKSNTTLEVIDLSFNRIENAGANYLSETLTSHNRSLKALSVVSNNIEGEGLVALSQSMKTNLTFSHIYIWGNKFDEATCIAYSDLIQMGCLKPDNTDVEPFVVDGRVYLAEVSNGLKKHYYWTSTYGESYDHSSNAGFALVPVGQQP

SEQ ID NO: 2799 - protein, 473 aa, Homo sapiens
MDAMKRGLCCVLLLCGAVFVSPSQEIHARFRRGARSYQVICRDEKTQMIYQQHQSWLRPVLRSNRVEYCWCNSGRAQCHSVPVKSCSEPRCFNGGTCQQALYFSDFVCQCPEGFAGKCCEIGNSDCYFGNGSAYRGTHSLTESGASCLPWNSMILIGKVYTAQNPSAQALGLGKHNYCRNPDGDAKPWCHVLKNRRLTWEYCDVPSCSTCGLRQYSQPQFRIKGGLFADIASHPWQAAIFAKHRRSPGERFLCGGILISSCWILSAAHCFQERFPPHHLTVILGRTYRVVPGEEEQKFEVEKYIVHKEFDDDTYDNDIALLQLKSDSSRCAQESSVVRTVCLPPADLQLPDWTECELSGYGKHEALSPFYSERLKEAHVRLYPSSRCTSQHLLNRTVTDNMLCAGDTRSGGPQANLHDACQGDSGGPLVCLNDGRMTLVGIISWGLGCGQKDVPGVYTKVTNYLDWIRDNMRP

SEQ ID NO: 2800 - protein, 136 aa, Homo sapiens
SSHVETRAHAEERLLKKLFSGYNKWSRPVANISDVVLVRFGLSIAQLIDVDEKNQMMTTNVWVKQEWHDYKLRWDPADYENVTSIRIPSELIWRPDIVLYNNCRRALLGRSAFRHQTPSWPFWENSVDCRVPWRGC

SEQ ID NO: 2801 - protein, 195 aa, Homo sapiens
KDGGKAAQANVRIGDVVLSIDGINAQGMTHLEAQNKIKGCTGSLNMTLQRASAAPKPEPVPVQKPTVTSVCSETSQELAEGQRRGSQGDSKQQNGPPRKHIVERYTEFYHVPTHSDASKKRLIEDTEDWRPRTGTTQSRSFRILAQITGTEHLKESEADNTKKAKEKIPLHVFSPKYTKLRDWHHEVSARALNVQ

SEQ ID NO: 2802 - protein, 403 aa, Homo sapiens
MEKSQKINPFILHILQEVDEEIKKGLAAGITLNIAGNNRLVPVERVTGEDFWILSKILKNCLYINGLDVGYNLLCDVGAYYAAKLLQKQLNLIYLNLMFNDIGPEGGELIAKVLHKNRTLKYLRMTGNKIENKGGMFFAAMLQINSSLEKLDLGDCDLGMQSVIAFATVLTQNQAIKAINLNRPILYSEQEESTVHVGRMLKENHCLVALHMCKHDIKNSGIQQLCDALYLNSSLRYLDVSCNKITHDGMVYLADVLKSNTTLEVIDLSFNRIENAGANYLSETLTSHNRSLKALSVVSNNIEGEGLVALSQSMKTNLTFSHIYIWGNKFDEATCIAYSDLIQMGCLKPDNTDVEPFVVDGRVYLAEVSNGLKKHYYWTSTYGESYDHSSNAGFALVPVGQQP

SEQ ID NO: 2803 - protein, 719 aa, Homo sapiens
AEVAAKARDTGILIFAIGVGQVDFNTLKSIGSEPHEDHVFLVANFSQIETLTSVFQKKLCTAHMCSTLEHNCAHFCINIPGSYVCRCKQGYILNSDQTTCRTVDYCASENHGCEHECVNADGSYLCQCHEGFALNPDKKTCTKIDYCASSNHGCQHECVNTDDSYSCHCLKGFTLNPDKKTCRRINYCALNKPGCEHECVNMEESYYCRCHRGYTLDPNGKTCSRVDHCAQQDHGCEQLCLNTEDSFVCQCSEGFLINEDLKTCSRVDYCLLSDHGCEYSCVNMDRSFACQCPEGHVLRSDGKTCAKLDSCALGDHGCEHSCVSSEDSFVCQCFEGYILREDGKTCRRKDVCQAIDHGCEHICVNSDDSYTCECLEGFRLAEDGKRCRRKDVCKSTHHGCEHICVNNGNSYICKCSEGFVLAEDGRRCKKCTEGPIDLVFVIDGSKSLGEENFEVVKQFVTGIIDSLTISPKAARVGLLQYSTQVHTEFTLRNFNSAKDMKKAVAHMKYMGKGSMTGLALKHMFERSFTQGEGARPLSTRVPRAAIVFTDGRAQDDVSEWASKAKANGITMYAVGVGKAIEEELQEIASEPTNKHLFYAEDFSTMDEISEKLKKGICEALEDSDGRQDSPAGELPKTVQQPTVQHRYLFEEDNLLRSTQKLSHSTKPSGSPLEEKHDQCKCENLIMFQNLANEEVRKLTQRLEEMTQRMEALENRLRYR

SEQ ID NO: 2804 - protein, 452 aa, Homo sapiens
MNKMALASFMKGRTVIGTPDEETMDIELPKKYHEMVGVIFSDTFSYRLKFNWGYRIPVIKEHSEYTEHCWAMHGEIFCYLAKYWLKGFVAFQAAINAAIIEVTTNHSVMEELTSVIGINMKIPPFISKGEIMNEWFHFTCLVSFSSFIYFASLNVARERGKFKKLMTVMGLRESAFWLSWGLTYICFIFIMSIFMALVITSIPIVFHTGFMVIFTLYSLYGLSLIALAFLMSVLIRKPMLAGLAGFLFTVFWGCLGFTVLYRQLPLSLGWVLSLLSPFAFTAGMAQITHLDNYLSGVIFPDPSGDSYKMIATFFILAFDTLFYLIFTLYFERVLPDKDGHGDSPLFFLKSSFWSKHQNTHHEIFENEINPEHSSDDSFEPVSPEFHGKEAIRIRNVIKEYNGKTGKVEALQGSEERLCPAAHRLRCGERLCPAAHHLGCEERPCPAATPSGN

SEQ ID NO: 2805 - protein, 937 aa, Homo sapiens
MEKMLAGCFLLILGQIVLLPAEARERSRGRSISRGRHARTHPQTALLESSCENKRADLVFIIDSSRSVNTHDYAKVKEFIVDILQFLDIGPDVTRVGLLQYGSTVKNEFSLKTFKRKSEVERAVKRMRHLSTGTMTGLAIQYALNIAFSEAEGARPLRENVPRVIMIVTDGRPQDSVAEVAAKARDTGILIFAIGVGQVDFNTLKSIGSEPHEDHVFLVANFSQIETLTSVFQKKLCTAHMCSTLEHNCAHFCINIPGSYVCRCKQGYILNSDQTTCRIQDLCAMEDHNCEQLCVNVPGSFVCQCYSGYALAEDGKRCVAVDYCASENHGCEHECVNADGSYLCQCHEGFALNPDKKTCTKIDYCASSNHGCQHECVNTDDSYSCHCLKGFTLNPDKKTCRRINYCALNKPGCEHECVNMEESYYCRCHRGYTLDPNGKTCSRVDHCAQQDHGCEQLCLNTEDSFVCQCSEGFLINEDLKTCSRVDYCLLSDHGCEYSCVNMDRSFACQCPEGHVLRSDGKTCAKLDSCALGDHGCEHSCVSSEDSFVCQCFEGYILREDGKTCRRKDVCQAIDHGCEHICVNSDDSYTCECLEGFRLAEDGKRCRRKDVCKSTHHGCEHICVNNGNSYICKCSEGFVLAEDGRRCKKCTEGPIDLVFVIDGSKSLGEENFEVVKQFVTGIIDSLTISPKAARVGLLQYSTQVHTEFTLRNFNSAKDMKKAVAHMKYMGKGSMTGLALKHMFERSFTQGEGARPLSTRVPRAAIVFTDGRAQDDVSEWASKAKANGITMYAVGVGKAIEEELQEIASEPTNKHLFYAEDFSTMDEISEKLKKGICEALEDSDGRQDSPAGELPKTVQQPTVQHRYLFEEDNLLRSTQKLSHSTKPSGSPLEEKHDQCKCENLIMFQNLANEEVRKLTQRLEEMTQRMEALENRLRYR

SEQ ID NO: 2806 - protein, 780 aa, Homo sapiens
MNVRIFYSVSQSPHSLLSLLFYCAILESRISATMPLFKLPAEEKQIDDAMRNFAEKVFASEVKDEGGRQEISPFDVDEICPISHHEMQAHIFHLETLSTSTEARRKKRFQGRKTVNLSIPLSETSSTKLSHIDEYISSSPTYQTVPDFQRVQITGDYASGVTVEDFEIVCKGLYRALCIREKYMQKSFQRFPKTPSKYLRNIDGEAWVANESFYPVFTPPVKKGEDPFRTDNLPENLGYHLKMKDGVVYVYPNEAAVSKDEPKPLPYPNLDTFLDDMNFLLALIAQGPVKTYTHRRLKFLSSKFQVHQMLNEMDELKELKNNPHRDFYNCRKVDTHIHAAACMNQKHLLRFIKKSYQIDADRVVYSTKEKNLTLKELFAKLKMHPYDLTVDSLDVHAGRQTFQRFDKFNDKYNPVGASELRDLYLKTDNYINGEYFATIIKEVGADLVEAKYQHAEPRLSIYGRSPDEWSKLSSWFVCNRIHCPNMTWMIQVPRIYDVFRSKNFLPHFGKMLENIFMPVFEATINPQADPELSVFLKHITGFDSVDDESKHSGHMFSSKSPKPQEWTLEKNPSYTYYAYYMYANIMVLNSLRKERGMNTFLFRPHCGEAGALTHLMTAFMIADDISHGLNLKKSPVLQYLFFLAQIPIAMSPLSNNSLFLEYAKNPFLDFLQKGLMISLSTDDPMQFHFTKEPLMEEYAIAAQVFKLSTCDMCEVARNSVLQCGISHEEKVKFLGDNYLEEGPAGNDIRRTNVAQIRMAYRYETWCYELNLIAEGLKSTE

SEQ ID NO: 2807 - protein, 389 aa, Homo sapiens
MDSSAAPTNASNCTDALAYSSCSPAPSPGSWVNLSHLDGNLSDPCGPNRTDLGGRDSLCPPTGSPSMITAITIMALYSIVCVVGLFGNFLVMYVIVRYTKMKTATNIYIFNLALADALATSTLPFQSVNYLMGTWPFGTILCKIVISIDYYNMFTSIFTLCTMSVDRYIAVCHPVKALDFRTPRNAKIINVCNWILSSAIGLPVMFMATTKYRQGSIDCTLTFSHPTWYWENLLKICVFIFAFIMPVLIITVCYGLMILRLKSVRMLSGSKEKDRNLRRITRMVLVVVAVFIVCWTPIHIYVIIKALVTIPETTFQTVSWHFCIALGYTNSCLNPVLYAFLDENFKRCFREFCIPTSSNIEQQNSTRIRQNTRDHPSTANTVDRTNHQS

SEQ ID NO: 2808 - protein, 407 aa, Homo sapiens
MFSVFEEITRIVVKEMDAGGDMIAVRSLVDADRFRCFHLVGEKRTFFGCRHYTTGLTLMDILDTDGDKWLDELDSGLQGQKAEFQILDNVDSTGELIVRLPKEITISGSFQGFHHQKIKISENRISQQYLATLENRKLKRELPFSFRSINTRENLYLVTETLETVKEETLKSDRQYKFWSQISQGHLSYKHKGQREVTIPPNRVLSYRVKQLVFPNKETMNIHFRGKTKSFPEGKSLGSEDSRNMKEKLEDMESVLKDLTEEKRKDVLNSLAKCLGKEDIRQDLEQRVSEVLISGELHMEDPDKPLLSSLFNAAGVLVEARAKAILDFLDALLELSEEQQFVAEALEKGTLPLLKDQVKSVMEQNWDELASSPPDMDYDPEARILCALYVVVSILLELAEGPTSVSS

SEQ ID NO: 2809 - protein, 702 aa, Homo sapiens
MWGRLWPLLLSILTATAVPGPSLRRPSRELDATPRMTIPYEELSGTRHFKGQAQNYSTLLLEEASARLLVGARGALFSLSANDIGDGAHKEIHWEASPEMQSKCHQKGKNNQTECFNHVRFLQRLNSTHLYACGTHAFQPLCAAIDAEAFTLPTSFEEGKEKCPYDPARGFTGLIIDGGLYTATRYEFRSIPDIRRSRHPHSLRTEETPMHWLNDAEFVFSVLVRESKASAVGDDDKVYYFFTERATEEGSGSFTQSRSSHRVARVARVCKGDLGGKKILQKKWTSFLKARLICHIPLYETLRGVCSLDAETSSRTHFYAAFTLSTQWKTLEASAICRYDLAEIQAVFAGPYMEYQDGSRRWGRYEGGVPEPRPGSCITDSLRSQGYNSSQDLPSLVLDFVKLHPLMARPVVPTRGRPLLLKRNIRYTHLTGTPVTTPAGPTYDLLFLGTADGWIHKAVVLGSGMHIIEETQVFRESQSVENLVISLLQHSLYVGAPSGVIQLPLSSCSRYRSCYDCILARDPYCGWDPGTHACAAATTIANRSQGSRTALIQDIERGNRGCESSRDTGRALQVHMGSMSPPSAWPCVLDGPETRQDLCQPPKPCVHSHAHMEECLSAGLQCPHPHLLLVHSCFIPASGLGVPSQLPHPIWSSSPAPCGDLFVKSLGTGQPGEVRLHHSPPLPSCVALVNQPPHSPWSFSRV

SEQ ID NO: 2810 - protein, 915 aa, Homo sapiens
MEKMLAGCFLLILGQIVLLPAEARERSRGRSISRGRHARTHPQTALLESSCENKRADLVFIIDSSRSVNTHDYAKVKEFIVDILQFLDIGPDVTRVGLLQYGSTVKNEFSLKTFKRKSEVERAVKRMRHLSTGTMTGLAIQYALNIAFSEAEGARPLRENVPRVIMIVTDGRPQDSVAEVAAKARDTGILIFAIGVGQVDFNTLKSIGSEPHEDHVFLVANFSQIETLTSVFQKKLCTAHMCSTLEHNCAHFCINIPGSYVCRCKQGYILNSDQTTCRIQDLCAMEDHNCEQLCVNVPGSFVCQCYSGYALAEDGKRCVAVDYCASENHGCEHECVNADGSYLCQCHEGFALNPDKKTCTRINYCALNKPGCEHECVNMEESYYCRCHRGYTLDPNGKTCSRVDHCAQQDHGCEQLCLNTEDSFVCQCSEGFLINEDLKTCSRVDYCLLSDHGCEYSCVNMDRSFACQCPEGHVLRSDGKTCAKLDSCALGDHGCEHSCVSSEDSFVCQCFEGYILREDGKTCRRKDVCQAIDHGCEHICVNSDDSYTCECLEGFRLAEDGKRCRRKDVCKSTHHGCEHICVNNGNSYICKCSEGFVLAEDGRRCKKCTEGPIDLVFVIDGSKSLGEENFEVVKQFVTGIIDSLTISPKAARVGLLQYSTQVHTEFTLRNFNSAKDMKKAVAHMKYMGKGSMTGLALKHMFERSFTQGEGARPLSTRVPRAAIVFTDGRAQDDVSEWASKAKANGITMYAVGVGKAIEEELQEIASEPTNKHLFYAEDFSTMDEISEKLKKGICEALEDSDGRQDSPAGELPKTVQQPTESEPVTINIQDLLSCSNFAVQHRYLFEEDNLLRSTQKLSHSTKPSGSPLEEKHDQCKCENLIMFQNLANEEVRKLTQRLEEMTQRMEALENRLRYR

SEQ ID NO: 2811 - protein, 162 aa, Homo sapiens
MVQARTGFCKKQQELWQRRKEAAEALGTRKVSVLLATSHSGARPAVSTMDSSAAPTNASNCTDALAYSSCSPAPSPGSWVNLSHLDGNLSDPCGPNRTDLGGRDSLCPPTGSPSMITAITIMALYSIVCVVGLFGNFLVMYVIVRYTKMKTATNIYIFNLAL

SEQ ID NO: 2812 - protein, 803 aa, Homo sapiens
MGIQGLLQFIKEASEPIHVRKYKGQVVAVDTYCWLHKGAIACAEKLAKGEPTDRYVGFCMKFVNMLLSHGIKPILVFDGCTLPSKKEVERSRRERRQANLLKGKQLLREGKVSEARECFTRSINITHAMAHKVIKAARSQGVDCLVAPYEADAQLAYLNKAGIVQAIITEDSDLLAFGCKKVILKMDQFGNGLEIDQARLGMCRQLGDVFTEEKFRYMCILSGCDYLSSLRGIGLAKACKVLRLANNPDIVKVIKKIGHYLKMNITVPEDYINGFIRANNTFLYQLVFDPIKRKLIPLNAYEDDVDPETLSYAGQYVDDSIALQIALGNKDINTFEQIDDYNPDTAMPAHSRSHSWDDKTCQKSANVSSIWHRNYSPRPESGTVSDAPQLKENPSTVGVERVISTKGLNLPRKSSIVKRPRSAELSEDDLLSQYSLSFTKKTKKNSSEGNKSLSFSEVFVPDLVNGPTNKKSVSTPPRTRNKFATFLQRKNEESGAVVVPGTRSRFFCSSDSTDCVSNKVSIQPLDETAVTDKENNLHESEYGDQEGKRLVDTDVARNSSDDIPNNHIPGDHIPDKATVFTDEESYSFESSKFTRTISPPTLGTLRSCFSWSGGLGDFSRTPSPSPSTALQQFRRKSDSPTSLPENNMSDVSQLKSEESSDDESHPLREEACSSQSQESGEFSLQSSNASKLSQCSSKDSDSEESDCNIKLLDSQSDQTSKLRLSHFSKKDTPLRNKVPGLYKSSSADSLSTTKIKPLGPARASGLSKKPASIQKRKHHNAENKPGLQIKLNELWKNFGFKKF

SEQ ID NO: 2813 - protein, 501 aa, Homo sapiens
MDTQAGSVDEENGRQLGEVELQCGICTKWFTADTFGIDTSSCLPFMTNYSFHCNVCHHSGNTYFLRKQANLKEMCLSALANLTWQSRTQDEHPKTMFSKDKDIIPFIDKYWECMTTRQRPGKMTWPNNIVKTMSKERDVFLVKEHPDPGSKDPEEDYPKFGLLDQDLSNIGPAYDNQKQSSAVSTSGNLNGGIAAGSSGKGRGAKRKQQDGGTTGTTKKARSDPLFSAQRLPPHGYPLEHPFNKDGYRYILAEPDPHAPDPEKLELDCWAGKPIPGDLYRACLYERVLLALHDRAPQLKISDDRLTVVGEKGYSMVRASHGVRKGAWYFEITVDEMPPDTAARLGWSQPLGNLQAPLGYDKFSYSWRSKKGTKFHQSIGKHYSSGYGQGDVLGFYINLPEDTETAKSLPDTYKDKALIKFKSYLYFEEKDFVDKAEKSLKQTPHSEVSINFGPCFKYPPKDLTYRPMSDMGWGAVVEHTLADVLYHVETEVDGRRSPPWEP

SEQ ID NO: 2814 - protein, 340 aa, Homo sapiens
MNKMALASFMKGRTVIGTPDEETMDIELPKKYHEMVGVIFSDTFSYRLKFNWGYRIPVIKEHSEYTEHCWAMHGEIFCYLAKYWLKGFVAFQAAINAAIIEVTTNHSVMEELTSVIGINMKIPPFISKGEIMNEWFHFTCLVSFSSFIYFASLNVARERGKFKKLMTVMGLRESAFWLSWGLTYICFIFIMSIFMALVITSIPIVFHTGFMVIFTLYSLYGLSLIALAFLMSVLIRKPMLAGLAGFLFTVFWGCLGFTVLYRQLPLSLGWVLSLLSPFAFTAGMAQITHLDNYLSGVIFPDPSGDSYKMIATFFILAFDTLFYLIFTLYFERVLPESEML

SEQ ID NO: 2815 - protein, 232 aa, Homo sapiens
MNFLLSWVHWSLALLLYLHHAKWSQAAPMAEGGGQNHHEVVKFMDVYQRSYCHPIETLVDIFQEYPDEIEYIFKPSCVPLMRCGGCCNDEGLECVPTEESNITMQIMRIKPHQGQHIGEMSFLQHNKCECRPKKDRARQEKKSVRGKGKGQKRKRKKSRYKSWSVYVGARCCLMPWSLPGPHPCGPCSERRKHLFVQDPQTCKCSCKNTDSRCKARQLELNERTCRCDKPRR

SEQ ID NO: 2816 - protein, 395 aa, Homo sapiens
MSVTKSTEGPQGAVAIKLDLMSPPESAKKLENKDSTFLDESPSESAGLKKTKGITVFQALIHLVKGNMGTGILGLPLAVKNAGILMGPLSLLVMGFIACHCMHILVKCAQRFCKRLNKPFMDYGDTVMHGLEANPNAWLQNHAHWGRHIVSFFLIITQLGFCCVYIVFLADNLKQVVEAVNSTTNNCYSNETVILTPTMDSRLYMLSFLPFLVLLVLIRNLRILTIFSMLANISMLVSLVIIIQYITQEIPDPSRLPLVASWKTYPLFFGTAIFSFESIGVVLPLENKMKNARHFPAILSLGMSIVTSLYIGMAALGYLRFGDDIKASISLNLPNCWLYQSVKLLYIAGILCTYALQFYVPAEIIIPFAISRVSTRWALPLDLSIRLVMVCLTCE

SEQ ID NO: 2817 - protein, 186 aa, Homo sapiens
MDSSAAPTNASNCTDALAYSSCSPAPSPGSWVNLSHLDGNLSDPCGPNRTDLGGRDSLCPPTGSPSMITAITIMALYSIVCVVGLFGNFLVMYVIVRFHRLYTNILSSNLVLGKPAEDLCFHLRLHYASAHHYRVLWTDDLAPQECPHALWLQRKGQESSKDHQDGAGGGGCVHRLLDSHSHLRHH

SEQ ID NO: 2818 - protein, 322 aa, Homo sapiens
RGQGPEPAPGGGVEGVGARGVALKLFVQLLGCSRFGGAVVRAGEAEPSGAARSASSGREEPQPEEGEEEEEKEEERGPQWRLGARKPGSWTGEAAVCADSAPAARAPQALARASGRGGRVARRGAEESGPPHSPSRRGSASRAGPGRASETMNFLLSWVHWSLALLLYLHHAKWSQAAPMAEGGGQNHHEVVKFMDVYQRSYCHPIETLVDIFQEYPDEIEYIFKPSCVPLMRCGGCCNDEGLECVPTEESNITMQIMRIKPHQGQHIGEMSFLQHNKCECRPKKDRARQEKKSVRGKGKGQKRKRKKSRYKSWSVCDKPRR

SEQ ID NO: 2819 - protein, 288 aa, Homo sapiens
MITAKPGKTPIQVLHEYGMKTKNIPVYECERSDVQIHVPTFTFRVTVGDITCTGEGTSKKLAKHRAAEAAINILKANASICFAVPDPLMPDPSKQPKNQLNPIGSLQELAIHHGWRLPEYTLSQEGGPAHKREYTTICRLESFMETGKGASKKQAKRNAAEKFLAKFSNISPENHISLTNVVGHSLGCTWHSLRNSPGEKINLLKRSLLSIPNTDYIQLLSEIAKEQGFNITYLDIDELSANGQYQCLAELSTSPITVCHGSGISCGNAQSDAAHNALQYLKIIAERK

SEQ ID NO: 2820 - protein, 3565 aa, Homo sapiens
MTAWRRFQSLLLLLGLLVLCARLLTAAKGQNCGGLVQGPNGTIESPGFPHGYPNYANCTWIIITGERNRIQLSFHTFALEEDFDILSVYDGQPQQGNLKVRLSGFQLPSSIVSTGSILTLWFTTDFAVSAQGFKALYEVLPSHTCGNPGEILKGVLHGTRFNIGDKIRYSCLPGYILEGHAILTCIVSPGNGASWDFPAPFCRAEGACGGTLRGTSSSISSPHFPSEYENNADCTWTILAEPGDTIALVFTDFQLEEGYDFLEISGTEAPSIWLTGMNLPSPVISSKNWLRLHFTSDSNHRRKGFNAQFQVKKAIELKSRGVKMLPSKDGSHKNSVLSQGGVALVSDMCPDPGIPENGRRAGSDFSRVGANVQFSCEDNYVLQGSKSITCQRVTETLAAWSDHRPICRARTCGSNLRGPSGVITSPNYPVQYEDNAHCVWVITTTDPDKVIKLAFEEFELERGYDTLTVGDAGKVGDTRSVLYVLTGSSVPDLIVSMSNQMWLHLQSDDSIGSPGFKAVYQEIEKGGCGDPGIPAYGKRTGSSFLHGDTLTFECPAAFELVGERVITCQQNNQWSGNKPSCVFSCFFNFTASSGIILSPNYPEEYGNNMNCVWLIISEPGSRIHLIFNDFDVEPQFDFLAVKDDGISDITVLGTFSGNEVPSQLASSGHIVRLEFQSDHSTTGRGFNITYTTFGQNECHDPGIPINGRRFGDRFLLGSSVSFHCDDGFVKTQGSESITCILQDGNVVWSSTVPRCEAPCGGHLTASSGVILPPGWPGYYKDSLHCEWIIEAKPGHSIKITFDRFQTEVNYDTLEVRDGPASSSPLIGEYHGTQAPQFLISTGNFMYLLFTTDNSRSSIGFLIHYESVTLESDSCLDPGIPVNGHRHGGDFGIRSTVTFSCDPGYTLSDDEPLVCERNHQWNHALPSCDALCGGYIQGKSGTVLSPGFPDFYPNSLNCTWTIEVSHGKGVQMIFHTFHLESSHDYLLITEDGSFSEPVARLTGSVLPHTIKAGLFGNFTAQLRFISDFSISYEGFNITFSEYDLEPCDDPGVPAFSRRIGFHFGVGDSLTFSCFLGYRLEGATKLTCLGGGRRVWSAPLPRCVAECGASVKGNEGTLLSPNFPSNYDNNHECIYKIETEAGKGIHLRTRSFQLFEGDTLKVYDGKDSSSRPLGTFTKNELLGLILNSTSNHLWLEFNTNGSDTDQGFQLTYTSFDLVKCEDPGIPNYGYRIRDEGHFTDTVVLYSCNPGYAMHGSNTLTCLSGDRRVWDKPLPSCIAECGGQIHAATSGRILSPGYPAPYDNNLHCTWIIEADPGKTISLHFIVFDTEMAHDILKVWDGPVDSDILLKEWSGSALPEDIHSTFNSLTLQFDSDFFISKSGFSIQFSTSIAATCNDPGMPQNGTRYGDSREAGDTVTFQCDPGYQLQGQAKITCVQLNNRFFWQPDPPTCIAACGGNLTGPAGVILSPNYPQPYPPGKECDWRVKVNPDFVIALIFKSFNMEPSYDFLHIYEGEDSNSPLIGSYQGSQAPERIESSGNSLFLAFRSDASVGLSGFAIEFKEKPREACFDPGNIMNGTRVGTDFKLGSTITYQCDSGYKILDPSSITCVIGADGKPSWDQVLPSCNAPCGGQYTGSEGVVLSPNYPHNYTAGQICLYSITVPKEFVVFGQFAYFQTALNDLAELFDGTHAQARLLSSLSGSHSGETLPLATSNQILLRFSAKSGASARGFHFVYQAVPRTSDTQCSSVPEPRYGRRIGSEFSAGSIVRFECNPGYLLQGSTALHCQSVPNALAQWNDTIPSCVVPCSGNFTQRRGTILSPGYPEPYGNNLNCIWKIIVTEGSGIQIQVISFATEQNWDSLEIHDGGDVTAPRLGSFSGTTVPALLNSTSNQLYLHFQSDISVAAAGFHLEYKTVGLAACQEPALPSNSIKIGDRYMVNDVLSFQCEPGYTLQGRSHISCMPGTVRRWNYPSPLCIATCGGTLSTLGGVILSPGFPGSYPNNLDCTWRISLPIGYGAHIQFLNFSTEANHDFLEIQNGPYHTSPMIGQFSGTDLPAALLSTTHETLIHFYSDHSQNRQGFKLAYQAYELQNCPDPPPFQNGYMINSDYSVGQSVSFECYPGYILIGHPVLTCQHGINRNWNYPFPRCDAPCGYNVTSQNGTIYSPGFPDEYPILKDCIWLITVPPGHGVYINFTLLQTEAVNDYIAVWDGPDQNSPQLGVFSGNTALETAYSSTNQVLLKFHSDFSNGGFFVLNFHAFQLKKCQPPPAVPQAEMLTEDDDFEIGDFVKYQCHPGYTLVGTDILTCKLSSQLQFEGSLPTCEAQCPANEVRTGSSGVILSPGYPGNYFNSQTCSWSIKVEPNYNITIFVDTFQSEKQFDALEVFDGSSGQSPLLVVLSGNHTEQSNFTSRSNQLYLRWSTDHATSKKGFKIRYAAPYCSLTHPLKNGGILNRTAGAVGSKVHYFCKPGYRMVGHSNATCRRNPLGMYQWDSLTPLCQAVSCGIPESPGNGSFTGNEFTLDSKVVYECHEGFKLESSQQATAVCQEDGLWSNKGKPPTCKPVACPSIEAQLSEHVIWRLVSGSLNEYGAQVLLSCSPGYYLEGWRLLRCQANGTWNIGDERPSCRVISCGSLSFPPNGNKIGTLTVYGATAIFTCNTGYTLVGSHVRECLANGLWSGSETRCLAGHCGSPDPIVNGHISGDGFSYRDTVVYQCNPGFRLVGTSVRICLQDHKWSGQTPVCVPITCGHPGNPAHGFTNGSEFNLNDVVNFTCNTGYLLQGVSRAQCRSNGQWSSPLPTCRVVNCSDPGFVENAIRHGQQNFPESFEYGMSILYHCKKGFYLLGSSALTCMANGLWDRSLPKCLAISCGHPGVPANAVLTGELFTYGAVVHYSCRGSESLIGNDTRVCQEDSHWSGALPHCTGNNPGFCGDPGTPAHGSRLGDDFKTKSLLRFSCEMGHQLRGSPERTCLLNGSWSGLQPVCEAVSCGNPGTPTNGMIVSSDGILFSSSVIYACWEGYKTSGLMTRHCTANGTWTGTAPDCTIISCGDPGTLANGIQFGTDFTFNKTVSYQCNPGYVMEAVTSATIRCTKDGRWNPSKPVCKAVLCPQPPPVQNGTVEGSDFRWGSSISYSCMDGYQLSHSAILSCEGRGVWKGEIPQCLPVFCGDPGIPAEGRLSGKSFTYKSEVFFQCKSPFILVGSSRRVCQADGTWSGIQPTCIDPAHNTCPDPGTPHFGIQNSSRGYEVGSTVFFRCRKGYHIQGSTTRTCLANLTWSGIQTECIPHACRQPETPAHADVRAIDLPTFGYTLVYTCHPGFFLAGGSEHRTCKADMKWTGKSPVCKSKGVREVNETVTKTPVPSDVFFVNSLWKGYYEYLGKRQPATLTVDWFNATSSKVNATFSEASPVELKLTGIYKKEEAHLLLKAFQIKGQADIFVSKFENDNWGLDGYVSSGLERGGFTFQGDIHGKDFGKFKLERQDPLNPDQDSSSHYHGTSSGSVAAAILVPFFALILSGFAFYLYKHRTRPKVQYNGYAGHENSNGQASFENPMYDTNLKPTEAKAVRFDTTLNTVCTVV

SEQ ID NO: 2821 - protein, 209 aa, Homo sapiens
MNFLLSWVHWSLALLLYLHHAKWSQAAPMAEGGGQNHHEVVKFMDVYQRSYCHPIETLVDIFQEYPDEIEYIFKPSCVPLMRCGGCCNDEGLECVPTEESNITMQIMRIKPHQGQHIGEMSFLQHNKCECRPKKDRARQEKKSVRGKGKGQKRKRKKSRPCGPCSERRKHLFVQDPQTCKCSCKNTDSRCKARQLELNERTCRCDKPRR

SEQ ID NO: 2822 - protein, 149 aa, Homo sapiens
LLLFCLCAFLSLSWYAALSGQKGDVVDVYQREFLALRDRLHAAEQESLKRSKELNLVLDEIKRAVSERQALRDGDGNRTWGRLTGPPIEAVERLTPARAAPAHRLPSPATPAGQGEQSAARGARGPGPHRSVGGDGHPERAARGALVPD

SEQ ID NO: 2823 - protein, 488 aa, Homo sapiens
DCGEEEECNNPCCNASNCTLRPGAECAHGSCCHQCKLLAPGTLCREQARQCDLPEFCTGKSPHCPTNFYQMDGTPCEGGQAYCYNGMCLTYQEQCQQLWGPGARPAPDLCFEKVNVAGDTFGNCGKDMNGEHRKCNMRDAKCGKIQCQSSEARPLESNAVPIDTTIIMNGRQIQCRGTHVYRGPEEEGDMLDPGLVMTGTKCGYNHICFEGQCRNTSFFETEGCGKKCNGHGVCNNNQNCHCLPGWAPPFCNTPGHGGSIDSGPMPPESVGPVVAGVLVAILVLAVLMLMYYCCRQNNKLGQLKPSALPSKLRQQFSCPFRVSQNSGTGHANPTFKLQTPQGKRKVINTPEILRKPSQPPPRPPPDYLRGGSPPAPLPAHLSRAARNSPGPGSQIERTESSRRPPPSRPIPPAPNCIVSQDFSRPRPPQKALPANPVPGRRSLPRPGGASPLRPPGAGPQQSRPLAALAPKRVWKTCNLKTGDQFQSQ

SEQ ID NO: 2824 - protein, 1318 aa, Homo sapiens
MDRQCSERPYSCTPTGRVSSAVSQNSRISPPVSTSMKDSSCMKVHQDSARRDRWSHPTTILLHKSQSSQATLMLQEHRMFMGEAYSAATGFKMLQDMNSADPFHLKYIIKKIKNMAHGSPKLVMETIHDYFIDNPEISSRHKFRLFQTLEMVIGASDVLEETWEKTFTRLALENMTKATELEDIYQDAASNMLVAICRHSWRVVAQHLETELLTGVFPHRSLLYVMGVLSSSEELFSQEDKACWEEQLIQMAIKSVPFLSTDVWSKELLWTLTTPSWTQQEQSPEKAFLFTYYGLILQAEKNGATVRRHLQALLETSHQWPKQREGMALTLGLAATRHLDDVWAVLDQFGRSRPIRWSLPSSSPKNSEDLRWKWASSTILLAYGQVAAKARAHILPWVDNIVSRMVFYFHYSSWDETLKQSFLTATLMLMGAVSRSEGAHSYEFFQTSELLQCLMVLMEKEPQDTLCTRSRQQAMHIASSLCKLRPPIDLERKSQLLSTCFRSVFALPLLDALEKHTCLFLEPPNIQLWPVARERAGWTHQGWGPRAVLHCSEHLQSLYSRTMEALDFMLQSLIMQNPTADELHFLLSHLYIWLASEKAHERQRAVHSCMILLKFLNHNGYLDPKEDFKRIGQLVGILGMLCQDPDRATQRCSLEGASHLYQLLMCHKTGEALQAESQAPKELSQAHSDGAPLWNSRDQKATPLGPQEMAKNHIFQLCSFQVIKDIMQQLTLAELSDLIWTAIDGLGSTSPFRVQAASEMLLTAVQEHGAKLEIVSSMAQAIRLRLCSVHIPQAKEKTLHAITLLARSHTCELVATFLNISIPLDSHTFQLWRALGAGQPTSHLVLTTLLACLQERPLPTGASDSSPCPKEKTYLRLLAAMNMLHELQFAREFKQAVQEGYPKLFLALLTQMHYVLELNLPSEPUPKQQAQEAAVPSPQSCSTSLEALKSLLSTTGHWHDFAHLELQGSWELFTTIHTYPKGVGLLARAMVQNHCRQIPAVLRQLLPSLQSPQERERKVAILILTKFLYSPVLLEVLPKQAALTVLAQGLHDPSPEVRVLSLQGLSNILFHPDKGSLLQGQLRPLLDGFFQSSDQVIVCIMGTVSDTLHRLGAQGTGSQSLGVAISTRSFFNDERDGIRAAAMALFGDLVAAMADRELSGLRTQVHQSMVPLLLHLKDQCPAVATQAKFTFYRCAVLLRWRLLHTLFCTLAWERGLSARHFLWTCLMTRSQEEFSIHLSQALSYLHSHSCHIKTWVTLFIGHTICYHPQAVFQMLNAVDTNLLFRTFEHLRSDPEPSIREFATSQLSFLQKVSARPKQ

SEQ ID NO: 2825 - protein, 91 aa, Homo sapiens
MAEPGHSHHLSARVRGRTERRIPRLWRLLLWAGTAFQVTQGTGPELHACKESEYHYEYTACDSTGSRWRVAVPHTPGLCTSLPDPIKGTEC

SEQ ID NO: 2826 - protein, 561 aa, Homo sapiens
MTVLEITLAVILTLLGLAILAILLTRWARCKQSEMYISRYSSEQSARLLDYEDGRGSRHAYSTQSDTSYDNRERSKRDYTPSTNSLALSRSSIALPQGSMSSIKCLQTTEEPPSRTAGAMMQFTAPIPGATGPIKLSQKTIVQTPGPIVQYPGSNAGPPSAPRGPPMAPIIISQRTASQLAAPIIISQRTARIPQVHTMDSSGKITLTPVVILTGYMDEELAKKSCSKIQILKCGGTARSQNSREENKEALKNDIIFTNSVESLKSAHIKEPEREGKGTDLEKDKIGMEVKVDSDAGIPKRQETQLKISEMSIPQGQGAQIKKSVSDVPRGQESQVKKSESGVPKGQEAQVTKSGLVVLKGQEAQVEKSEMGVPRRQESQVKKSQSGVSKGQEAQVKKRESVVLKGQEAQVEKSELKVPKGQEGQVEKTEADVPKEQEVQEKKSEAGVLKGPESQVKNTEVSVPETLESQVKKSESGVLKGQEAQEKKESFEDKGNNDKEKERDAEKDPNKKEKGDKNTKGDKGKDKVKGKRESEINGEKSKGSKRAKANTGRKYNKKVEE

SEQ ID NO: 2827 - protein, 396 aa, Homo sapiens
MMNSSNIQVKQRGPYTYRVRFLAKENVTQDAEDNTVSFLQPNGAIFEPSLSVGTEADNFTVLNLAVAAASHIYQNQFVQMILNSLINKSKSSMFQVRTLRELLWGYRDPFLSLVPYPVTTTVGLFYPYNNTADGVYKVFNGKDNISKVAIIDTYKGKRNLSYWESHCDMINGTDAASFPPFVEKSQVLQFFSSDICRSIYAVFESDVNLKGIPVYRFVLPSKAFASPVENPDNYCFCTEKIISKNCTSYGVLDISKCKEGRPVYISLPHFLYASPDVSEPIDGLNPNEEEHRTYLDIEPITGFTLQFAKRLQVNLLVKPSEKIQVLKNLKRNYIVPILWLNETGTIGDEKANMFRSQVTGKINLLGLIEMILLSVGVVMFVAFMISYCACRSKTIK

SEQ ID NO: 2828 - protein, 205 aa, Homo sapiens
MAEPGHSHHLSARVRGRTERRIPRLWRLLLWAGTAFQVTQGTGPELHACKESEYHYEYTACDSTGSRWRVAVPHTPGLCTSLPDPIKGTECSFSCNAGEFLDMKDQSCKPCAEGRYSLGTGIRFDEWDELPHGFASLSANMELDDSAAESTGNCTSSKWVPRGDYIASNTDECTATLMYAVNLKQSGTVNFEYYYPDSSIIFEFF

SEQ ID NO: 2829 - protein, 281 aa, Homo sapiens
MRAAGVGLVDCHCHLSAPDFDRDLDDVLEKAKKANVVALVAVAEHSGEFEKIMQLSERYNGFVLPCLGVHPVQGLPPEDQRSVTLKDLDVALPIIENYKDRLLAIGEVGLDFSPRFAGTGEQKEEQRQVLIRQIQLAKRLNLPVNVHSRSAGRPTINLLQEQGAEKVLLHAFDGRPSVAMEGVRAGYFFSIPPSIIRSGQLLSLFSKKQKLVKQLPLTSICLETDSPALGPEKQVRNEPWNISISAEYIAQVKGISVEEVIEVTTQNALKLFPKLRHLLQK

SEQ ID NO: 2830 - protein, 143 aa, Homo sapiens
RAAGVGLVDCHCHLSAPDFDRDLDDVLEKAKKANVVALVAVAEHSGEFEKIMQLSERYNGFVLPCLGVHPVQGLPPEDQRSVTLKDLDVALPIIENYKDRLLAIGEVGLDFSPRFAGTGEQKEEQRQVLIRQIQLAKRLNLPV

SEQ ID NO: 2831 - protein, 442 aa, Homo sapiens
PRLPRAGARERVRGFLTQTRVRSAQSPGGSLPSDDLGEMESSSSDYYNKDNEEESLLANVASLRHELKITEWSLQSLGEELSSVSPSENSDYAPNPSRSEKLILDVQPSHPGLLNYSPYENVCKISGSSTDFQKKPRDKMFSSSAPVDQEIKSLREKLNKLRQQNACLVTQNHSLMTKFESIHFELTQSRAKVSMLESAQQQAASVPILEEQIINLEAEVSAQDKVLREAENKLEQSQKMVIEKEQSLQESKEECIKLKVDLLEQTKQGKRAERQRNEALYNAEELSKAFQQYKKKVAEKLEKVQAEEEILERNLTNCEKENKRLQERCGLYKSELEILKEKLRQLKEENNNGKEKLRIMAVKNSEVMAQLTESRQSILKLESELENKDEILRDKFSLMNENRELKVRVAAQNERLDLCQQEIESSRVELRSLEKIISQLPN

SEQ ID NO: 2832 - protein, 231 aa, Homo sapiens
MSVEHADIWVKSYSLYSRERYICNSGFKRKAGTSSLTECVLNKATNVAHWTTPSLKCIRDPALVHQRPAPPSTVTTAGVTPQPESLSPSGKEPAASSPSSNNTAATTAAIVPGSQLMPSKSPSTGTTEISSHESSHGTPSQTTAKNWELTASASHQPPGVYPQGHSDTTVAISTSTVLLCGLSAVSLLACYLKSRQTPPLASVEMEAMEALPVTWGTSSRDEDLENCSHHL

SEQ ID NO: 2833 - protein, 34 aa, Homo sapiens
ISSLRGIQRIAATSKILSAPGSQREGRNPQLNQQ

SEQ ID NO: 2834 - protein, 1016 aa, Homo sapiens
MVAMAEAEAGVAVEVRGLPPAVPDELLTLYFENRRRSGGGPVLSWQRLGCGGVLTFREPADAERVLAQADHELHGAQLSLRPAPPRAPARLLLQGLPPGTTPQRLEQHVQALLRASGLPVQPCCALASPRPDRALVQLPKPLSEADVRVLEEQAQNLGLEGTLVSLARVPQARAVRVVGDGASVDLLLLELYLENERRSGGGPLEDLQRLPGPLGTVASFQQWQVAERVLQQEHRLQGSELSLVPHYDILEPEELAENTSGGDHPSTQGPRATKHALLRTGGLVTALQGAGTVTMGSGEEPGQSGASLRTGPMVQGRGIMTTGSGQEPGQSGTSLRTGPMGSLGQAEQVSSMPMGSLEHEGLVSLRPVGLQEQEGPMSLGPVGSAGPVETSKGLLGQEGLVEIAMDSPEQEGLVGPMEITMGSLEKAGPVSPGCVKLAGQEGLVEMVLLMEPGAMRFLQLYHEDLLAGLGDVALLPLEGPDMTGFRLCGAQASCQAAEEFLRSLLGSISCHVLCLEHPGSARFLLGPEGQHLLQGLEAQFQCVFGTERLATATLDTGLEEVDPTEALPVLPGNAHTLWTPDSTEEVRELLATLEGLDLDGEDWLPRELEEEGPQEQPEEEVTPGHEEEEPVAPSTVAPRWLEEEAALQLALHRSLEPQGQVAEQEEAAALRQALTLSLLEQPPLEAEEPPDGGTDGKAQLVVHSAFEQDVEELDRALRAALEVHVQEETVGPWRRTLPAELRARLERCHGVSVALRGDCTILRGFGAHPARAARHLVALLAGPWDQSLAFPLAASGPTLAGQTLKGPWNNLERLAENTGEFQEVVRAFYDTLDAARSSIRVVRVERVSHPLLQQQYELYRERLLQRCERRPVEQVLYHGTTAPAVPDICAHGFNRSFCGRNATVYGKGVYFARRASLSVQDRYSPPNADGHKAVFVARVLTGDYGQGRRGLRAPPLRGPGHVLLRYDSAVDCICQPSIFVIFHDTQALPTHLITCEHVPRASPDDPSGLPGRSPDT

SEQ ID NO: 2835 - protein, 997 aa, Homo sapiens
MPLAFCGSENHSAAYRVDQGVLNNGCFVDALNVVPHVFLLFITFPILFIGWGSQSSKVHIHHSTWLHFPGHNLRWILTFMLLFVLVCEIAEGILSDGVTESHHLHLYMPAGMAFMAAVTSVVYYHNIETSNFPKLLIALLVYWTLAFITKTIKFVKFLDHAIGFSQLRFCLTGLLVILYGMLLLVEVNVIRVRRYIFFKTPREVKPPEDLQDLGVRFLQPFVNLLSKGTYWWMNAFIKTAHKKPIDLRAIGKLPIAMRALTNYQRLCEAFDAQVRKDIQGTQGARAIWQALSHAFGRRLVLSSTFRILADLLGFAGPLCIFGIVDHLGKENDVFQPKTQFLGVYFVSSQEFLANAYVLAVLLFLALLLQRTFLQASYYVAIETGINLRGAIQTKIYNKIMHLSTSNLSMGEMTAGQICNLVAIDTNQLMWFFFLCPNLWAMPVQIIVGVILLYYILGVSALIGAAVIILLAPVQYFVATKLSQAQRSTLEYSNERLKQTNEMLRGIKLLKLYAWENIFRTRVETTRRKEMTSLRAFAIYTSISIFMNTAIPIAAVLITFVGHVSFFKEADFSPSVAFASLSLFHILVTPLFLLSSVVRSTVKALVSAEIREEQCAPHEPTPQGPASKYQAVPLRVVNRKRPAREDCRGLTGPLQSLVPSADGDADNCCVQIMGGYFTWTPDGIPTLSNITIRIPRGQLTMIVGQVGCGKSSLLLAALGEMQKVSGAVFWSSLPDSEIGEDPSPERETATDLDIRKRGPVAYASQKPWLLNATVEENIIFESPFNKQRYKMVIEACSLQPDIDILPHGDQTQIGERGINLSGGQRQRISVARALYQHANVVFLDDPFSALDIHLSDHLMQAGILELLRDDKRTVVLVTHKLQYLPHADWIIAMKDGTIQREGTLKDFQRSECQLFEHWKTLMNRQDQELEKRRQLRARRMTTCRPCCTSVLRSHGEPAPSTCPPPASCSCRCWSSHSCSSTWSWWPSTTGWPSGPTAP

SEQ ID NO: 2836 - protein, 650 aa, Homo sapiens
MAGMSQRPPSMYWCVGPEESAVCPERAMETLNGAGDTGGKPSTRGGDPAARSRRTEGIRAAYRRGDRGGARDLLEEACDQCASQLEKGQLLSIPAAYGDLEMVRYLLSKRLVELPTEPTDDNPAVVAAYFGHTAVVQELLESLPGPCSPQRLLNWMLALACQRGHLGVVKLLVLTHGADPESYAVRKNEFPVIVRLPLYAAIKSGNEDIAIFLLRHGAYFCSYILLDSPDPSKHLLRKYFIEASPLPSSYPGKTALRVKWSHLRLPWVDLDWLIDISCQITELDLSANCLATLPSVIPWGLINLRKLNLSDNHLGELPGVQSSDEIICSRLLEIDISSNKLSHLPPGFLHLSKLQKLTASKNCLEKLFEEENATNWIGLRKLQELDISDNKLTELPALFLHSFKSLNSLNVSRNNLKVFPDPWACPLKCCKASRNALECLPDKMAVFWKNHLKDVDFSENALKEVPLGLFQLDALMFLRLQGNQLAALPPQEKWTCRQLKTLDLSRNQLGKNEDGLKTKRIAFFTTRGRQRSGTEAASVLEFPAFLSESLEVLCLNDNHLDTVPPSVCLLKSLSELYLGNNPGLRELPPELGQLGNLWQLDTEDLTISNVPAEIQKEGPKAMLSYLRAQLRKAEKCKLMKMIIVGPPRQG

SEQ ID NO: 2837 - protein, 309 aa, Homo sapiens
MITFLPIIFSSLVVVTFVIGNFANGFIALVNSIEWFKRQKISFADQILTALAVSRVGLLWVLLLNWYSTVLNPAFNSVEVRTTAYNIWAVINHFSNWLATTLSIFYLLKIANFSNFIFLHLKRRVKSVILVMLLGPLLFLACHLFVINMNEIVRTKEFEGNMTWKIKLKSAMYFSNMTVTMVANLVPFTLTLLSFMLLICSLCKHLKKMQLHGKGSQDPSTKVHIKALQTVISFLLLCAIYFLSIMISVWSFGSLENKPVFMFCKAIRFSYPSIHPFILIWGNKKLKQTFLSVFWQMRYWVKGEKTSSP

SEQ ID NO: 2838 - protein, 353 aa, Homo sapiens
MGQDQTKQQIEKGLQLYQSNQTEKALQVWTKVLEKSSDLMGRFRVLGCLVTAHSEMGRYKEMLKFAVVQIDTARELEDADFLLESYLNLARSNEKLCEFHKTISYCKTCLGLPGTRAGAQLGGQVSLSMGNAFLGLSVFQKALESFEKALRYAHNNDDAMLECRVCCSLGSFYAQVKDYEKALFFPCKAAELVNNYGKGWSLKYRAMSQYHMAVAYRLLGRLGSAMECCEESMKIALQHGDRPLQALCLLCFADIHRSRGDLELSQLKLHCLSESIYRSKGLQRELRAHVVRFHECVEETELYCGLCGESIGEKNSRLQALPCSHIFHLRWGLLGGWTGVGRISSGHSRAQLA

SEQ ID NO: 2839 - protein, 838 aa, Homo sapiens
MERMNWLSRLASRGPGHRIPQGANLQTPVMADPETCLMVFKNHWSQVVRILERQGPRAAPGGADDLSAVRNHTYQMLTLLAEDRAVPSAPTGPGPLLEFALHEDLLTRVLTWQLQWDELGDGVEERRAEQLKLFEMLVSEARQPLLRHGPVREALLTLLDACGRPVPSSPALDEGLVLLLSQLCVCVAQEPSLLEFFLQPPPEPGAAPRLLLFSRLVPFVHREGTLGQQARDALLLLMALSAGSPTVGRYIADHSYFCPVLATGLSALYSSLPRKIEVPGDDWHCLRREDWLGVPALALFMSSLEFCNAVIQVAHPLVQKQLVDYIHNGFLVPVMGPALHKTSVEEMIASTAYLELFLRSISEPALLRTFLRFLLLHRHDTHTILDTLVARIGSNSRLCMVSLSLFRTLLNLSCEDVLLQLVLRYLVPCNHVMLSQKPAVRDVDLYGRAADKFLSLIPRCCRHHAPSPPRPEHASWARGPGSPSVDSSSVTTVPRPSTPSRLALFLRQQSLGGSESPGPAPCSPGLSASPASSPGRRPTPAEEPGELEDNYLEYLREARRGVDRCVRACRTWSAPYDGERPSPEPSPFGSRTKKRSLLPEEDRNNVGEGEEEELGRRGRAGGAGEGPGHLPPPQLNGVPGSWPEGAKKVRLVPKEGAGELLEGISEGMAGLEGFGQELRELEVALSNGGTGSESPLEPPLPLEEEEAYESFTCPPEPPGPFLSSPLRTLNQLPSQPFTGKLLSLGLPFCVLFACSRHVCAGFLDLLAMSFLCTCLAPHPSCLHHFQIRVMSYLCPCVCLYVFHACAGLSIDLHLSLVCMSYVHVPPLSLVWPFPAICN

SEQ ID NO: 2840 - protein, 409 aa, Homo sapiens
MVELFIFLFLLGETPFKVVVKSLSPKELVRIHVPKPLDRNDGTFLMRYRMYETVDEGLKIEVLYGDEHVAQSPYILKGPVYHEYCECPEDPQAWQKTLSCPTKEPQIAKDFASFPSINLQQMLKEVPKRFGDERGAIVHYTILNNHVYRRSLGKYTDFKMFSDEILLSLTRKVLLPDLEFYVNLGDWPLEHRKVNGTPSPIPIISWCGSLDSRDVVLPTYDITHSMLEAMRGVTNDLLSIQGNTGPSWINKTERAFFRGRDSREERLQLVQLSKENPQLLDAGITGYFFFQEKEKELGKAKLMGFFDFFKYKYQVNVDGTVAAYRYPYLMLGDSLVLKQDSPYYEHFYMALEPWKHYVPIKRNLSDLLEKVKWAKSFTLSPRLECSGTISTHCNLCLPGSRNFVPQPPE

SEQ ID NO: 2841 - protein, 120 aa, Homo sapiens
MSAGSERGAAATPGGLPAPCASKVELRLSCRHLLDRDPLTKSDPSVALLQQAQGQWVQVGRTEVVRSSLHPVFSKVFTVDYYFEEVQRLRFEVYDTHGPSGFSCQEDDFLGGMECTLGQV

SEQ ID NO: 2842 - protein, 129 aa, Homo sapiens
MWRPVQLCHFHSALLHSRQKPWPSPAVFFRRNVRGLPPRFSSPTPLWRKVLSTAVVGAPLLLGARYVMAEAREKRRMRLVVDGMGRFGRSLKVGLQISLDYWWCTNVVLRGVEEPRLLGGDVCVSPAGG

SEQ ID NO: 2843 - protein, 1018 aa, Homo sapiens
MDKILEAVVTSSYPVSVKQGLVRRVLEAARQPLEREQCLALLALGARLYVGGAEELPRRVGCQLLHVAGRHHPDVFAEFFSARRVLRLLQGGAGPPGPRALACVQLGLQLLPEGPAADEVFALLRREVLRTVCERPGPAACAQVARLLARHPRCVPDGPHRLLFCQQLVRCLGRFRCPAEGEEGAVEFLEQAQQVSGLLAQLWRAQPAAILPCLKELFAVISCAEEEPPSSALASVVQHLPLELMDGVVRNLSNDDSVTDSQMLTAISRMIDWVSWPLGKNIDKWIIALLKGLAAVKKFSILIEVSLTKIEKVFSKLLYPIVRGAALSVLKYMLLTFQHSHEAFHLLLPHIPPMVASLVKEDSNSGTSCLEQLAELVHCMVFRFPGFPDLYEPVMEAIKDLHVPNEDRIKQLLGQDAWTSQKSELAGFYPRLMAKSDTGKIGLINLGNTCYVNSILQALFMASDFRHCVLRLTENNSQPLMTKLQWLFGFLEHSQRPAISPENFLSASWTPWFSPGTQQDCSEYLKYLLDRLHEEEKTGTRICQKLKQSSSPSPPEEPPAPSSTSVEKMFGGKIVTRICCLCCLNVSSREEAFTDLSLAFPPPERCRRRRLGSVMRPTEDITARELPPPTSAQGPGRVGPRRQRKHCITEDTPPTSLYIEGLDSKEAGGQSSQEERIEREEEGKEERTEKEEVGEEEESTRGEGEREKEEEVEEEEEKVEKETEKEAEQEKEEDSLGAGTHPDAAIPSGERTCGSEGSRSVLDLVNYFLSPEKLTAENRYYCESCASLQDAEKVVELSQGPCYLILTLLRFSFDLRTMRRRKILDDVSIPLLLRLPLAGGRGQAYDLCSVVVHSGVSSESGHYYCYAREGAARPAASLGTADRPEPENQWYLFNDTRVSFSSFESVSNVTSFFPKDTAYVLFYRQRPREGPEAELGSSRVRTEPTLHKDLMEAISKDNILYLQEQEKEARSRAAYISALPTSPHWGRGFDEDKDEDEGSPGGCNPAGGNGGDFHRLVF

SEQ ID NO: 2844 - protein, 62 aa, Homo sapiens
MWATLPLLCAGAWLLGVPVCGAAELCVNSLEKFHFKSWMSKKTKAHCVLVAESVGEHQCMCF

SEQ ID NO: 2845 - protein, 225 aa, Homo sapiens
MTSQPVPNETIIVLPSNVINFSQAEKPEPTNQGQDSLKKHLHAEIKVIGTIQILCGMMVLSLGIILASASFSPNFTQVTSTLLNSAYPFIGPFFFIISGSLSIATEKRLTKLLVHSSLVGSILSALSALVGFIILSVKQATLNPASLQCELDKNNIPTRSYVSYFYHDSLYTTDCYTAKASLAGTLSLMLICTLLEFCLAVLTAVLRWKQAYSDFPGVSVLAGFT

SEQ ID NO: 2846 - protein, 670 aa, Homo sapiens
MTSVWKRLQRVGKRAAKFQFVACYHELVLECTKKWQPDKLVVVWTRRNRRICSKAHSWQPGIQNPYRGTVVWMVPENVDISVTLYRDPHVDQYEAKEWTFIIENESKGQRKVLATAEVDLARHAGPVPVQVPVRLRLKPKSVKVVQAELSLTLSGVLLREGRATDDDMQSLASLMSVKPSDVGNLDDFAESDEDEAHGPGAPEARARVPQPDPSRELKTLCEEEEEGQGRPQQAVASPSNAEDTSPAPVSAPAPPARTSRGQGSERANEAGGQVGPEAPRPPETSPEMRSSRQPAQDTAPTPAPRLRKGSDALRPPVPQGEDEVPKASGAPPAGLGSARETQAQACPQEGTEAHGARLGPSIEDKGSGDPFGRQRLKAEEMDTEDRPEASGVDTEPRSGGREANTKRSGVRAGEAEESSAVCQVDAEQRSKVRHVDTKGPEATGVMPEAPPALVSSSQSLLEWCQEVTTGYRGVRITNFTTSWRNGLAFCAILHRFYPDKIDYASLDPLNIKQNNKQAFDGFAALGVSRLLEPADMVLLSVPDKLIVMTYLCQIRAFCTGQELQLVQLEGGGGAGTYRVGSAQPSPPDDLDAGGLAQRLRGHGAEGPQEPKEAADRADGAAPGVASRNAVAGRASKDGGAEAPRESRPAEVPAEGLVNGAGAPGGGGVRL

SEQ ID NO: 2847 - protein, 383 aa, Homo sapiens
MTGGTNKTSSSISEILDKVQEDAEDVLFSLGFGQEDHKDTSRIPARFFTTPSQAKGIDFQLFLKSQVRRIEMEDPCLMLASRFKQVQTLAVTADAFFCLYSYVSKTPVQKFTPSHMFWNCNHPTDVPSIRILSREPEPQSPRDRLRKAISKMCLYTCPRDRPPPPHNTPKRNSLDQVVLEVMDKVKEEKQFLQQDSDLGQFSQEDPVPPAEGKKLPTSPYPCVFCCEEETQQRMSTVLAPSQTLDSNPKVPCCTHSLPIEDPQWSTDPAQIRRELCSLPATNTETHPAKDETFWKRKSRARKSLFQKNLMGRKVKSLDLSITQQKWKQSVDRPELRRSLSQQPQDTFDLEEVQSNSEEEQSQSRWPSRPRHPHHHQTFAGKDS

SEQ ID NO: 2848 - protein, 590 aa, Homo sapiens
SICVVFAMSFVPASFTLVLIEERVTRAKHLQLMGGLSPTLYWLGNFLWDMCNYLVPACIVVLIFLAFQQRAYVAPANLPALLLLLLLYGTAYVVLTCINLFIGINGSMATFVLELFSDQKLQEVSRILKQVFLIFPHFCLGRGLIDMVRNQAMADAFERLGDRQFQSPLRWEVVGKNLLAMVIQGPLFLLFTLLLQHRSQLLPQPRVRSLPLLGEEDEDVARERERVVQGATQGDVLVLRNLTKVYRGQRMPAVDRLCLGIPPGECFGLLGVNGAGKTSTFRMVTGDTLASRGEAVLAGHSVAREPSAAHLSMGYCPQSDAIFELLTGREHLELLARLRGVPEAQVAQTAGSGLARLGLSWYADRPAGTYSGGNKRKLATALALVGDPAVVFLDEPTTGMDPSARRFLWNSLLAVVREGRSVMLTSHSMEECEALCSRLAIMVNGRFRCLGSPQHLKGRFAAGHTLTLRVPAARSQPAAAFVAAEFPGAELREAHGGRLRFQLPPGGRCALARVFGELAVHGAEHGVEDFSVSQTMLEEVFLYFSKDQGKDEDTEEQKEAGVGVDPAPGLQHPKRVSQFLDDPSTAETVL

SEQ ID NO: 2849 - protein, 779 aa, Homo sapiens
SATNLESEEDSEAPVDSTLNNNRNQEFVSSSRSISGENATSESEFTLGGDDSGVSMNPARSALALLAMAQSGDAVSVKIEEENQDLMHFNLQKKRAKGKGQVKEEDNSNQKQLKRPAQGKRQNPRGTDIYLPYTPPSSESCHDGYQHQEKMRQKIKEVEEKQPEVKTGFIASFLDFLKSGPKQQFSTLAVRMPNRTRRPGTQMVRTFCPPPLPKPSSTTPTPLVSETGGNSPSDKVDNELKNLEHLSSFSSDEDDPGYSQDAYKSVSTPLTTLDATSDKKKKTEALQVATTSPTANTTGTATTSSTTVGAVKQEPLHSTSYAVNILENISSSESSKPIELDGLPSDQFAKGQDTVAIEGFTDEEDTESGGEGQYRERDEFVVKIEDIETFKEALKTGKEPPAIWKVQKALLQKFVPEIRDGQREFAATNSYLGYFGDAKSKYKRIYVKFIENANKKEYVRVCSKKPRNKPSQTIRTVQAKPSSSSKTSDPLASKTTTTKAPSVKPKVKQPKVKAEPPPKKRKKWKEEFSSSQSDSSPEIHTSSSDDEEFEPPAPFVTRFLNTRAMKETFKSYMELLVSIALDPDTMQALEKSNDELLLPHMKKIDGMLNDNRKRLLLNLHLDQSFKNALESFPELTIITRDSKAKSGGTAISKIKMNGKAYNKKTLRTSKTTTKSAQEFAVDPEKIQLYSLYHSLHHYKYHVYLICKDEVISSHLLKKNVFQNVKETLAIVFWSVLKRVVKYMCVCILSMYSVNNDLIYCSESLCYVLCSDLPEPHHLL

SEQ ID NO: 2850 - protein, 389 aa, Homo sapiens
MAPSHRASQVGFCPTPERPLWRLPPTCRPRRMSVCYRPPGNETLLSWKTSRATGTAFLLLAALLGLPGNGFVVWSLAGWRPARGRPLAATLVLHLALADGAVLLLTPLFVAFLTRQAWPLGQAGCKAVYYVCALSMYASVLLTGLLSLQRCLAVTRPFLAPRLRSPALARRLLLAVWLAALLLAVPAAVYRHLWRDRVCQLCHPSPVHAAAHLSLETLTAFVLPFGLMLGCYSVTLARLRGARWGSGRHGARVGRLVSAIVLAFGLLWAPYHAVNLLQAVAALAPPEGALAKLGGAGQAARAGTTALAFFSSSVNPVLYVFTAGDLLPRAGPRFLTRLFEGSGEARGGGRSREGTMELRTTPQLKVVGQGRGNGDPGGGMEKDGPEWDL

SEQ ID NO: 2851 - protein, 152 aa, Homo sapiens
MAEPGHSHHLSARVRGRTERRIPRLWRLLLWAGTAFQVTQGTGPELHACKESEYHYEYTACDSTGSRWRVAVPHTPGLCTSLPDPIKGTECSFSCNAGEFLDMKDQSCKPCAEGRYSLGTGIRFDEWDELPHGFASLSANMELDDSAAESTG

SEQ ID NO: 2852 - protein, 622 aa, Homo sapiens
MDSHSGEPALLPCGTCDMVFRSSALLATHTQRFCIGHPTQEMTFGAQASVATEPQRAAVVPQEHQGVPQEPQGLPDQQASRSALKRLTEEVQWLRLSLQEMRPWITEVPRVFAGPWTRSEARPQSPMSEAVGSPSERLRALFRTRARRVAEMEAQSRALQLRGEELSRRLQVVACTRGGMSRLFGLEQEIRELQAEAGRTRGALEVLGARIQELQAEPGNPLSSRREAELYSPVQKANPGTLAAEIRALREAYIRDGGRDPGVLGQIWQLQVEASALELQRSQTRRGRAGATSGELPVVEAENRRLEAEILALQMQRGRAPLGPQDLRLLGDASLQPKGRRDPPLLPPPVAPPLPPLPGFSEPQLPGTMTRNLGLDSHFLLPTSDMLGPAPYDPGAGLVIFYDFLRGLEASWIWVQLRTGLARDGRDTGRTTALPPALCLPPPPAPGPMGNCAILASRQPVPRLPPSSSVSLVCELQVWQGLAWARAPQPKAWVSLGLFDQDQRVLSGRWRLPLRALPLDPSLSLGQLNGIPQAGQAELFLRLVNARDAAVQTLAEINPASVHEYQYPPPVSSTSSLEASFLTPAVGFADPPPRTEEPLSGVKDRDEGLGPHHSSDLPPVSF

SEQ ID NO: 2853 - protein, 115 aa, Homo sapiens
FYNYMMGIEFNPRIGKWFDFKLFFNGRPGIVAWTLINLSFAAKQRELHSHVTNAMVLVNVLQAIYVIDFFWNETWYLKTIDICHDHFGWYLGWGDCVWLPYLYTLQMRNAAVEAE

SEQ ID NO: 2854 - protein, 822 aa, Homo sapiens
MRLALLWALGLLGAGSPLPSWPLPNIGGTEEQQAESEKAPREPLEPQVLQDDLPISLKKVLQTSLPEPLRIKLELDGDSHILELLQNRELVPGRPTLVWYQPDGTRVVSEGHTLENCCYQGRVRGYAGSWVSICTCSGLRGLVVLTPERSYTLEQGPGDLQGPPIISRIQDLHLPGHTCALSWRESVHTQKPPEHPLGQRHIRRRRDVVTETKTVELVIVADHSEAQKYRDFQHLLNRTLEVALLLDTFFRPLNVRVALVGLEAWTQRDLVEISPNPAVTLENFLHWRRAHLLPRLPHDSAQLVTGTSFSGPTVGMAIQNSICSPDFSGGVNMDHSTSILGVASSIAHELGHSLGLDHDLPGNSCPCPGPAPAKTCIMEASTDFLPGLNFSNCSRRALEKALLDGMGSCLFERLPSLPPMAAFCGNMFVEPGEQCDCGFLDDCVDPCCDSLTCQLRPGAQCASDGPCCQNCQLRPSGWQCRPTRGDCDLPEFCPGDSSQCPPDVSLGDGEPCAGGQAVCMHGRCASYAQQCQSLWGPGAQPAAPLCLQTANTRGNAFGSCGRNPSGSYVSCTPRDAICGQLQCQTGRTQPLLGSIRDLLWETIDVNGTELNCSWVHLDLGSDVAQPLLTLPGTACGPGLVCIDHRCQRVDLLGAQECRSKCHGHGVCDSNRHCYCEEGWAPPDCTTQLKATSSLTTGLLLSLLVLLVLVMLGASYWYRARLHQRLCQLKGPTCQYRAAQSGPSERPGPPQRALLARGTKQASALSFPAPPSRPLPPDPVSKRLQAELADRPNPPTRPLPADPVVRSPKVTVGGEKGTASPPT

SEQ ID NO: 2855 - protein, 1122 aa, Homo sapiens
GDGGKMAAAGALERSFVELSGAERERPRHFREFTVCSIGTANAVAGAVKYSESAGGFYYVESGKLFSVTRNRFIHWKTSGDTLELMEESLDINLLNNAIRLKFQNCSVLPGGVYVSETQNRVIILMLTNQTVHRLLLPHPSRMYRSELVVDSQMQSIFTDIGKVDFTDPCNYQLIPAVPGISPNSTASTAWLSSDGEALFALPCASGGIFVLKLPPYDIPGMVSVVELKQSSVMQRLLTGWMPTAIRGDQSPSDRPLSLAVHCVEHDAFIFALCQDHKLRMWSYKEQMCLMVADMLEYVPVKKDLRLTAGTGHKLRLAYSPTMGLYLGIYMHAPKRGQFCIFQLVSTESNRYSLDHISSLFTSQETLIDFALTSTDIWALWHDAENQTVVKYINFEHNVAGQWNPVFMQPLPEEEIVIRDDQDPREMYLQSLFTPGQFTNEALCKALQIFCRGTERNLDLSWSELKKEVTLAVENELQGSVTEYEFSQEEFRNLQQEFWCKFYACCLQYQEALSHPLALHLNPHTNMVCLLKKGYLSFLIPSSLVDHLYLLPYENLLTEDETTISDDVDIARDVICLIKCLRLIEESVTVDMSVIMEMSCYNLQSPEKAAEQILEDMITIDVENVMEDICSKLQEIRNPIHAIGLLIREMDYETEVEMEKGFNPAQPLNIRMNLTQLYGSNTAGYIVCRGVHKIASTRFLICRDLLILQQLLMRLGDAVIWGTGQLFQAQQDLLHRTAPLLLSYYLIKWGSECLATDVPLDTLESNLQHLSVLELTDSGALMANRFVSSPQTIVELFFQEVARKHIISHLFSQPKAPLSQTGLNWPEMITAITSYLLQLLWPSNPGCLFLECLMGNCQYVQLQDYIQLLHPWCQVNVGSCRFMLGRCYLVTGEGQKALECFCQAASEVGKEEFLDRLIRSEDGEIVSTPRLQYYDKVLRLLDVIGLPELVIQLATSAITEAGDDWKSQATLRTCIFKHHLDLGHNSQAYEALTQIPDSSRQLDCLRQLVVVLCERSQLQDLVEFPYVNLHNEVVGIIESRARAVDLMTHNYYELLYAFHIYRHNYRKAGTVMFEYGMRLGREVRTLRGLEKQGNCYLAALNCLRLIRPEYAWIVQPVSGAVV

SEQ ID NO: 2856 - protein, 135 aa, Homo sapiens
ERGDSEPTPGCSGLGPGGVRGFGDGGGAPSWAPEDAWMGTHPKYLEMMELDIGDATQVYVAFLVYLDLMESKSWHEVNCVGLPELQLICLVGTEIEGEGLQTVVPTPITASLSHNRYWRATFEEGKYLATLKDLH

SEQ ID NO: 2857 - protein, 904 aa, Homo sapiens
MGMDLTCPFGISPACGAQASWSIFGADAAEVPGTRGHSQQEAAMPHIPEDEEPPGEPQAAQSPAGQGPPAAGVSCSPTPTIVLTGDATSPEGETDKNLANRVHSPHKRLSHRHLKVSTASLTSVDPAGHIIDLVNDQLPDISISEEDKKKNLALLEEAKLVSERFLTRRGRKSRSSPGDSPSAVSPNLSPSASPTSSRSNSLTVPTPPGLDVCSGPPSPLPGAPPQQKGDEADVSSPHPGEPNVPKGLADRKQNDQRKVSQGRLAPRPPPVEKSKEIAIEQKENFDPLQYPETTPKGLAPVTNSSGKMALNSPQPGPVESELGKQLLKTGWEGSPLPRSPTQDAAGVGPPASQGRGPAGEPMGPEAGSKAELPPTVSRPPLLRGLSWDSGPEEPGPRLQKVLAKLPLAEEEKRFAGKAGGKLAKAPGLKDFQIQVQPVRMQKLTKLREEHILMRNQNLVGLKLPDLSEAAEQEKGLPSELSPAIEEEESKSGLDVMPNISDVLLRKLRVHRSLPGSAPPLTEKEVENVFVQLSLAFRNDSYTLESRINQAERERNLTEENTEKELENFKASITSSASLWHHCEHRETYQKLLEDIAVLHRLAARLSSRAEVVGAVRQEKRMSKATEVMMQYVENLKRTYEKDHAELMEFKKLANQNSSRSCGPSEDGVPRTARSMSLTLGKNMPRRRVSVAVVPKFNALNLPGQTPSSSSIPSLPALSESPNGKGSLPVTSALPALLENGKTNGDPDCEASAPALTLSCLEELSQETKARMEEEAYSKGFQEGLKKTKELQDLKEEEEEQKSESPEEPEEVEETEEEEKGPRSSKLEELVHFLQVMYPKLCQHWQVIWMMAAVMLVLTVVLGLYNSYNSCAEQADGPLGRSTCSAAQRDSWWSSGLQHEQPTEQ

SEQ ID NO: 2858 - protein, 397 aa, Homo sapiens
MLRSTSTVTLLSGGAARTPGAPSRRANVCRLRLTVPPESPVPEQCEKKIERKEQLLDLSNGEPTRKLPQGVVYGVVRRSDQNQQKEMVVYGWSTSQLKEEMNYIKDKTLVDVTLENSNIKDQIRNLQQTYEASMDKLREKQRQLEVAQVENQLLKMKVESSQEANAEVMREMTKKLYSQYEEKLQEEQRKHSAEKEALLEETNSFLKAIEEANKKMQAAEISLEEKDQRIGELDRLIERMEKERHQLQLQLLEHETEMSGELTDSDKERYQQLEEASASLRERIRHLDDMVHCQQKKVKQMVEEIESLKKKLQQKQLLILQLLEKISFLEGENNELQSRLDYLTETQAKTEVETREIGVGCDLLPSQTGRTREIVMPSRNYTPYTRVLELTMKKTLT

SEQ ID NO: 2859 - protein, 297 aa, Homo sapiens
MSMNNSKQLVSPAAALLSNTTCQTENRLSVFFSVIFMTVGILSNSLAIAILMKAYQRFRQKSKASFLLLASGLVITDFFGHLINGAIAVFVYASDKEWIRFDQSNVLCSIFGICMVFSGLCPLLLGSVMAIERCIGVTKPIFHSTKITSKHVKMMLSGVCLFAVFIALLPILGHRDYKIQASRTWCFYNTEDIKDWEDRFYLLLFSFLGLLALGVSLLCNAITGITLLRVKFKSQQHRQGRSHHLEMVIQLLAIMCVSCICWSPFLGYRIILNGKEKYKVYEEQSDFLHSDKTLNEK

SEQ ID NO: 2860 - protein, 668 aa, Homo sapiens
MDQREILQKFLDEAQSKKITKEEFANEFLKLKRQSTKYKADKTYPTTVAEKPKNIKKNRYKDILPYDYSRVELSLITSDEDSSYINANFIKGVYGPKAYIATQGPLSTTLLDFWRMIWEYSVLIIPENFSVFSLIREMRTQRPSLVQTQEQYELVYNAVLELFKRQMDVIRDKHSGTESQAKHCIPEKNHTLQADSYSPNLPKSTTKAAKMMNQQRTKMEIKESSSFDFRTSEISAKEELVLHPAKSSTSFDFLELNYSFDKNADTTMKWQTKAFPIVGEPLQKHQSLDLGSLLFEGCSNSKPVNAAGRYFNSKVPITRTKSTPFELIQQRETKEVDSKENFSYLESQPHDSCFVEMQAQKVMHVSSAELNYSLPYDSKHQIRNASNVKHHDSSALGVYSYIPLVENPYFSSWPPSGTSSKMSLDLPEKQDGTVFPSSLLPTSSTSLFSYYNSHDSLSLNSPTNISSLLNQESAVLATAPRIDDEIPPPLPVWTPESFIVVEEAGEFSPNVPKSLSSAVKVKIGTSLEWGGTSEPKKFDDSVILRPSKSVKLRSPKSELHQDRSSPPPPLPERTLESFFLADEDCMQAQSIETYSTSYPDTMENSTSSKQTLKTPGKSFTRSKSLKILRNMKKSICNSCPPNKPAESVQSNNSSSFLNFGMCVILLKS

SEQ ID NO: 2861 - protein, 208 aa, Homo sapiens
ITCPPPMSVEHADIWVKSYSLYSRERYICNSGFKRKAGTSSLTECVLNKATNVAHWTTPSLKCIRTTEISSHESSHGTPSQTTAKNWELTASASHQPPGVYPQGHSDTTGRKQHLLPDFQASFQRDCINKHIEDKECWTVASFLLFLAISTSTVLLCGLSAVSLLACYLKSRQTPPLASVEMEAMEALPVTWGTSSRDEDLENCSHHL

SEQ ID NO: 2862 - protein, 88 aa, Homo sapiens
MASPGKPGADEAQEEEGELEGGSAGPRAAILEQAEELFLLCDKEAKGFITKHDLQGLQSDLPLTPEQLEAVFESLDRAHTGFLTAREF

SEQ ID NO: 2863 - protein, 921 aa, Homo sapiens
MPLRHWGMARGSKPVGDGAQPMAAMGGLKVLLHWAGPGGGEPWVTFSESSLTAEEVCIHIAHKVGITPPCFNLFALFDAQAQVWLPPNHILEIPRDASLMLYFRIRFYFRNWHGMNPREPAVYRCGPPGTEASSDQTAQGMQLLDPASFEYLFEQGKHEFVNDVASLWELSTEEEIHHFKNESLGMAFLHLCHLALRHGIPLEEVAKKTSFKDCIPRSFRRHIRQHSALTRLRLRNVFRRFLRDFQPGRLSQQMVMVKYLATLERLAPRFGTERVPVCHLRLLAQAEGEPCYIRDSGVAPTDPGPESAAGPPTHEVLVTGTGGIQWWPVEEEVNKEEGSSGSSGRNPQASLFGKKAKAHKAVGQPADRPREPLWAYFCDFRDITHVVLKEHCVSIHRQDNKCLELSLPSRAAALSFVSLVDGYFRLTADSSHYLCHEVAPPRLVMSIRDGIHGPLLEPFVQAKLRPEDGLYLIHWSTSHPYRLILTVAQRSQAPDGMQSLRLRKFPIEQQDGAFVLEGWGRSFPSVRELGAALQGCLLRAGDDCFSLRRCCLPQPGETSNLIIMRGARASPRTLNLSQLSFHRVDQKEITQLSHLGQGTRTNVYEGRLRVEGSGDPEEGKMDDEDPLVPGRDRGQELRVVLKVLDPSHHDIALAFYETASLMSQVSHTHLAFVHGVCVRGPENIMVTEYVEHGPLDVWLRRERGHVPMAWKMVVAQQLASALSYLENKNLVHGNVCGRNILLARLGLAEGTSPFIKLSDPGVGLGALSREERVERIPWLAPECLPGGANSLSTAMDKWGFGATLLEICFDGEAPLQSRSPSEVCLGDPWALPAVGAPPRNPEDRIRAQSCIPSGLVTSSLSGLPAGGPLAGAQCSPSLFRSLWKSLVPGTQKASKRLDFSFRQSDQGSDGRRPGCRVGKKG

SEQ ID NO: 2864 - protein, 61 aa, Homo sapiens
MRAAGVGLVDCHCHLSAPDFDRDLDDVLEKAKKANVVALVAVAEHSGEFEKIMQLSERIWM

SEQ ID NO: 2865 - protein, 764 aa, Homo sapiens
MVAMAEAEAGVAVEVRGLPPAVPDELLTLYFENRRRSGGGPVLSWQRLGCGGVLTFREPADAERVLAQADHELHGAQLSLRPAPPRAPARLLLQGLPPGTTPQRLEQHVQALLRASGLPVQPCCALASPRPDRALVQLPKPLSEADVRVLEEQAQNLGLEGTLVSLARVPQARAVRVVGDGASVDLLLLELYLENERRSGGGPLEDLQRLPGPLGTVASFQQWQVAERVLQQEHRLQGSELSLVPHYDILEPEELAENTSGGDHPSTQGPRATKHALLRTGGLVTALQGAGTVTMGSGEEPGQSGASLRTGPMVQGRGIMTTGSGQEPGQSGTSLRTGPMGSLGQAEQVSSMPMGSLEHEGLVSLRPVGLQEQEGPMSLGPVGSAGPVETSKGLLGQEGLVEIAMDSPEQEGLVGPMEITMGSLEKAGPVSPGCVKLAGQEGLVEMVLLMEPGAMRFLQLYHEDLLAGLGDVALLPLEGPDMTGFRLCGAQASCQAAEEFLRSLLGSISCHVLCLEHPGSARFLLGPEGQHLLQGLEAQFQCVFGTERLATATLDTGLEEVDPTEALPVLPGNAHTLWTPDSTGGDQEDVSLEEVRELLATLEGLDLDGEDWLPRELEEEGPQEQPEEEVTPGHEEEEPVAPSTVAPRWLEEEAALQLALHRSLEPQGQVAEQEEAAALRQALTLSLLEQPPLEAEEPPDGGTDGKAQLVVHSAFEQDVEELDRALRAALEVHVQEETVGPWRRTLPAELRARLERCHGWRGRR

SEQ ID NO: 2866 - protein, 645 aa, Homo sapiens
MEDSQDLNEQSVKKTCTESDVSQSQNSRSMEMQDLASPHTLVGGGDTPGSSKLEKSNLSSTSVTTNGTGGENMTVLNTADWLLSCNTPSSATMSLLAVKTEPLNSSETTATTGDGALDTFTGSVITSSGYSPRSAHQYSPQLYPSKPYPHILSTPAAQTMSAYAGQTQYSGMQQPAVYTAYSQTGQPYSLPTYDLGVMLPAIKTESGLSQTQSPLQSGCLSYSPGFSTPQPGQTPYSYQMPGSSFAPSSTIYANNSVSNSTNFSGSQQDYPSYTAFGQNQYAQYYSASTYGAYMTSNNTADGTPSSTSTYQLQESLPGLTNQPGTDLHPGEFDTMQSPSTPIKDLDERTCRSSGSKSRGRGRKNNPSPPPDSDLERVFVWDLDETIIVFHSLLTGSYAQKYGKDPPMAVTLGLRMEEMIFNLADTHLFFNDLEECDQVHIDDVSSDDNGQDLSTYSFATDGFHAAASSANLCLPTGVRGGVDWMRKLAFRYRRVKELYNTYKNNVGGLLGPAKRDAWLQLRAEIEGLTDSWLTNALKSLSIISTRSNCINVLVTTTQLIPALAKVLLYSLGGAFPIENIYSATKIGKESCFERIMQRFGRKVVYVVIGDGVEEEQAAKKHNMPFWRISSHSDLLALHQALELEYL

SEQ ID NO: 2867 - protein, 337 aa, Homo sapiens
MADLDSPPKLSGVQQPSEGVGGGRCSEISAELIRSLTELQELEAVYERLCGEEKVVERELDALLEQQNTIESKMVTLHRMGPNLQLIEGDAKQLAGMITFTCNLAENVSSKVRQLDLAKNRLYQAIQRADDILDLKFCMDGVQTALRSEDYEQAAAHTHRYLCLDKSVIELSRQGKEGSMIDANLKLLQEAEQRLKAIVAEKFAIATKEGDLPQVERFFKIFPLLGLHEEGLRKFSEYLCKQVASKAEENLLMVLGTDMSDRRAAVIFADTLTLLFEGIARIVETHQPIVETYYGPGRLYTLIKYLQVECDRQVEKVVDKFIKQRDYHQQNFVFSFF

SEQ ID NO: 2868 - protein, 141 aa, Homo sapiens
MRVEPSWPNQLLKTSVKFLMTSPEIASLSWGQMKVKGSNTTYKDCKVWPGGSRTWDWRETGTEHSPGVQPADVKEVVEKGVQTLVIGRGMSEALKVPSSTVEYLKKHGIDVRVLQTEQAVKEYNALVAQGVRVGGVFHSTC

SEQ ID NO: 2869 - protein, 695 aa, Homo sapiens
MGITSLLANGVYAAAYPLHDGDYNGENVEFNDRKLLYEEWARYGVFYKYQPIDLVRKYFGEKIGLYFAWLGVYTQMLIPASIVGIIVFLYGCATMDENIPSMEMCDQRHNITMCPLCDKTCSYWKMSSACATARASHLFDNPATVFFSVFMALWAATFMEHWKRKQMRLNYRWDLTGFEEEEEAVKDHPRAEYEARVLEKSLKKESRNKETDKVKLTWRDRFPAYLTNLVSIIFMIAVTFAIVLGVIIYRISMAAALAMNSSPSVRSNIRVTVTATAVIINLVVIILLDEVYGCIARWLTKIEVPKTEKSFEERLIFKAFLLKFVNSYTPIFYVAFFKGRFVGRPGDYVYIFRSFRMEECAPGGCLMELCIQLSIIMLGKQLIQNNLFEIGIPKMKKLIRYLKLKQQSPPDHEECVKRKQRYEVDYNLEPFAGLTPEYMEMIIQFGFVTLFVASFPLAPLFALLNNIIEIRLDAKKFVTELRRPVAVRAKDIGIWYNILRGIGKLAVIINAFVISFTSDFIPRLVYLYMYSKNGTMHGFVNHTLSSFNVSDFQNGTAPNDPLDLGYEVQICRYKDYREPPWSENKYDISKDFWAVLAARLAFVIVFQNLVMFMSDFVDWVIPDIPKDISQQIHKEKVLMVELFMREEQDKQQLLETWMEKERQKDEPPCNHHNTKACPDSLGSPAPSHAYHGGVL

SEQ ID NO: 2870 - protein, 41 aa, Homo sapiens
MWATLPLLCAGAWLLGVPVCGAAELCVNSLGTQRARRPRGC

SEQ ID NO: 2871 - protein, 118 aa, Homo sapiens
MWATLPLLCAGAWLLGVPVCGAAELCVNSLVAGLSPPLGPWSLRSPSQPERCCPWRNSSWWTAPRTSIITAAKGVSPARLSSISCTTRGSWVKTPTPTRARMVIASSNLERPSALSRM

SEQ ID NO: 2872 - protein, 1441 aa, Homo sapiens
MRAGVQTGDRIIKVNGTLVTHSNHLEVVKLIKSGSYVALTVQGRPPGSPQIPLADSEVEPSVIGHMSPIMTSPHSPGASGNMERITSPVLMGEENNVVHNQKVEILRKMLQKEQERLQLLQEDYNRTPAQRLLKEIQEAKKHIPQLQEQLSKATGSAQDGAVVTPSRPLGDTLTVSEAETDPGDVLGRTDCSSGDASRPSSDNADSPKSGPKERIYLEENPEKSETIQDTDTQSLVGSPSTRIAPHIIGAEDDDFGTEHEQINGQCSCFQSIELLKSRPAHLAVFLHHVVSQFDPATLLCYLYSDLYKHTNSKETRRIFLEFHQFFLDRSAHLKVSVPDEMSADLEKRRPELIPEDLHRHYIQTMQERVHPEVQRHLEDFRQKRSMGLTLAESELTKLDAERDKDRLTLEKERTCAEQIVAKIEEVLMTAQAVEEDKSSTMQYVILMYMKHLGVKVKEPRNLEHKRGRIGFLPKIKQSMKKDKEGEEKGKRRGFPSILGPPRRPSRHDNSAIGRAMELQKARHPKHLSTPSSVSPEPQDSAKLRQSGLANEGTDAGYLPANSMSSVASGASFSQEGGKENDTGSKQVGETSAPGDTLDGTPRTLNTVFDFPPPPLDQVQEEECEVERVTEHGTPKPFRKFDSVAFGESQSEDEQFENDLETDPPNWQQLVSREVLLGLKPCEIKRQEVINELFYTERAHVRTLKVLDQVFYQRVSREGILSPSELRKIFSNLEDILQLHIGLNEQMKAVRKRNETSVIDQIGEDLLTWFSGPGEEKLKHAAATFCSNQPFALEMIKSRQKKDSRFQTFVQDAESNPLCRRLQLKDIIPTQMQRLTKYPLLLDNIAKYTEWPTEREKVKKAADHCRQILNYVNQAVKEAENKQRLEDYQRRLDTSSLKLSEYPNVEELRNLDLTKRKMIHEGPLVWKVNRDKTIDLYTLLLEDILVLLQKQDDRLVLRCHSKILASTADSKHTFSPVIKLSTVLVRQVATDNKALFVISMSDNGAQIYELVAQTVSEKTVWQDLICRMAASVKEQSTKPIPLPQSTPGEGDNDEEDPSKLKEEQHGISVTGLQSPDRDLGLESTLISSKPQSHSLSTSGKSEVRDLFVAERQFAKEQHTDGTLKEVGEDYQIAIPDSHLPVSEERWALDALRNLGLLKQLLVQQLGLTEKSVQEDWQHFPRYRTASQGPQTDSVIQNSENIKAYHSGEGHMPFRTGTGDIATCYSPRTSTESFAPRDSVGLAPQDSQASNILVMDHMIMTPEMPTMEPEGGLDDSGEHFFDAREAHSDENPSEGDGAVNKEEKDVNLRISGNYLILDGYDPVQESSTDEEVASSLTLQPMTGIPAVESTHQQQHSPQNTHSDGAISPFTPEFLVQQRWGAMEYSCFEIQSPSSCADSQSQIMEYIHKIEADLEHLKKVEESYTILCQRLAGSALTDKHSDKS

SEQ ID NO: 2873 - protein, 689 aa, Homo sapiens
MAGMSQRPPSMYWCVGPEESAVCPERAMETLNGAGDTGGKPSTRGGDPAARSRRTEGIRAAYRRGDRGGARDLLEEACDQCASQLEKGQLLSIPAAYGDLEMVRYLLSKRLVELPTEPTDDNPAVVAAYFGHTAVVQELLESLPGPCSPQRLLNWMLALACQRGHLGVVKLLVLTHGADPESYAVRKNEFPVIVRLPLYAAIKSGNEDIAIFLLRHGAYFCSYILLDSPDPSKHLLRKYFIEASPLPSSYPGKTALRVKWSHLRLPWVDLDWLIDISCQITELDLSANCLATLPSVIPWGLINLRKLNLSDNHLGELPGVQSSDEIICSRLLEIDISSNKLSHLPPGFLHLSKLQKLTASKNCLEKLFEEENATNWIGLRKLQELDISDNKLTELPALFLHSFKSLNSLNVSRNNLKVFPDPWACPLKCCKASRNALECLPDKMAVFWKNHLKDVDFSENALKEVPLGLFQLDALMFLRLQGNQLAALPPQEKWTCRQLKTLDLSRNQLGKNEDGLKTKRIAFFTTRGRQRSGTEAASVLEFPAFLSESLEVLCLNDNHLDTVPPSVCLLKSLSELYLGNNPGLRELPPELGQLGNLWQLDTEDLTISNVPAEIQKEGPKAMLSYLRAQLRKAEKCKLMKMIIVGPPRQGKSTLLEILQTGRAPQVVHGEATIRTTKWELQRPAGSRAK

SEQ ID NO: 2874 - protein, 364 aa, Homo sapiens
MQRLGATLLCLLLAAAVPTAPAPAPTATSAPVKPGPALSYPQEEATLNEMFREVEELMEDTQHKLRSAVEEMEAEEAAAKASSEVNLANLPPSYHNETNTDTKVGNNTIHVHREIHKITNNQTGQMVFSETVITSVGDEEGRRSHECIIDEDCGPSMYCQFASFQYTCQPCRGQRMLCTRDSECCGDQLCVWGHCTKMATRGSNGTICDNQRDCQPGLCCAFQRGLLFPVCTPLPVEGELCHDPASRLLDLITWELEPDGALDRCPCASGLLCQPHRLPRLEPGFVPSLPSHSLVYVCKPTFVGSRDQDGEILLPREVPDEYEVGSFMEEVRQELEDLERSLTEEMALREPAAAAAALLGGEEI

SEQ ID NO: 2875 - protein, 59 aa, Homo sapiens
AAGVGLVDCHCHLSAPDFDRDLDDVLEKAKKANVVALVAVAEHSGEFEKIMQLSERIWM

SEQ ID NO: 2876 - protein, 1002 aa, Homo sapiens
MAFLHLCHLALRHGIPLEEVAKKTSFKDCIPRSFRRHIRQHSALTRLRLRNVFRRFLRDFQPGRLSQQMVMVKYLATLERLAPRFGTERVPVCHLRLLAQAEGEPCYIRDSGVAPTDPGPESAAGPPTHEVLVTGTGGIQWWPVEEEVNKEEGSSGSSGRNPQASLFGKKAKAHKAVGQPADRPREPLWAYFCDFRDITHVVLKEHCVSIHRQDNKCLELSLPSRAAALSFVSLVDGYFRLTADSSHYLCHEVAPPRLVMSIRDGIHGPLLEPFVQAKLRPEDGLYLIHWSTSHPYRLILTVAQRSQAPDGMQSLRLRKFPIEQQDGAFVLEGWGRSFPSVRELGAALQGCLLRAGDDCFSLRRCCLPQPGETSNLIIMRGARASPRTLNLSQLSFHRVDQKEITQLSHLGQGTRTNVYEGRLRVEGSGDPEEGKMDDEDPLVPGRDRGQELRVVLKVLDPSHHDIALAFYETASLMSQVSHTHLAFVHGVCVRGPENIMVTEYVEHGPLDVWLRRERGHVPMAWKMVVAQQLASALSYLENKNLVHGNVCGRNILLARLGLAEGTSPFIKLSDPGVGLGALSREERVERIPWLAPECLPGGANSLSTAMDKWGFGATLLEICFDGEAPLQSRSPSEKEHFYQRQHRLPEPSCPQLATLTSQCLTYEPTQRPSFRTILRDLTRLQPHNLADVLTVNPDSPASDPTVFHKRYLKKIRDLGEGHFGKVSLYCYDPTNDGTGEMVAVKALKADCGPQHRSGWKQEIDILRTLYHEHIIKYKGCCEDQGEKSLQLVMEYVPLGSLRDYLPRHSIGLAQLLLFAQQICEGMAYLHAQHYIHRDLAARNVLLDNDRLVKIGDFGLAKAVPEGHEYYRVREDGDSPVFWYAPECLKEYKFYYASDVWSFGVTLYELLTHCDSSQSPPTKFLELIGIAQGQMTVLRLTELLERGERLPRPDKCPCEVYHLMKNCWETEASFRPTFENLIPILKTVHEKYQGQAPSVFSVC

SEQ ID NO: 2877 - protein, 616 aa, Homo sapiens
MEDSQDLNEQSVKKTCTESDVSQSQNSRSMEMQDLASPHTLVGGGDTPGSSKLEKSNLSSTSVTTNGTGVSLLAVKTEPLNSSETTATTGDGALDTFTGSVITSSGYSPRSAHQYSPQLYPSKPYPHILSTPAAQTMSAYAGQTQYSGMQQPAVYTAYSQTGQPYSLPTYDLGVMLPAIKTESGLSQTQSPLQSGCLSYSPGFSTPQPGQTPYSYQMPGSSFAPSSTIYANNSVSNSTNFSGSQQDYPSYTAFGQNQYAQYYSASTYGAYMTSNNTADGTPSSTSTYQLQESLPGLTNQPGEFDTMQSPSTPIKDLDERTCRSSGSKSRGRGRKNNPSPPPDSDLERVFVWDLDETIIVFHSLLTGSYAQKYGKDPPMAVTLGLRMEEMIFNLADTHLFFNDLEECDQVHIDDVSSDDNGQDLSTYSFATDGFHAAASSANLCLPTGVRGGVDWMRKLAFRYRRVKELYNTYKNNVGGLLGPAKRDAWLQLRAEIEGLTDSWLTNALKSLSIISTRSNCINVLVTTTQLIPALAKVLLYSLGGAFPIENIYSATKIGKESCFERIVSRFGTNITYVVIGDGRDEEHAANQHNMPFWRISSHSDLLALHQALELEYL

SEQ ID NO: 2878 - protein, 264 aa, Homo sapiens
MAGMSQRPPSMYWCVGPEESAVCPERAMETLNGAGDTGGKPSTRGGDPAARSRRTEGIRAAYRRGDRGGARDLLEEACDQCASQLEKGQLLSIPAAYGDLEMVRYLLSKRLVELPTEPTDDNPAVVAAYFGHTAVVQELLESLPGPCSPQRLLNWMLALACQRGHLGVVKLLVLTHGADPESYAVRKNEFPVIVRLPLYAAIKSGNEDIAIFLLRHGAYFCSYILLDSPDPSKHLLRKYFIEASPLPSSYPGKTVSSHCLWSVF

SEQ ID NO: 2879 - protein, 358 aa, Homo sapiens
MSVCYRPPGNETLLSWKTSRATGTAFLLLAALLGLPGNGFVVWSLAGWRPARGRPLAATLVLHLALADGAVLLLTPLFVAFLTRQAWPLGQAGCKAVYYVCALSMYASVLLTGLLSLQRCLAVTRPFLAPRLRSPALARRLLLAVWLAALLLAVPAAVYRHLWRDRVCQLCHPSPVHAAAHLSLETLTAFVLPFGLMLGCYSVTLARLRGARWGSGRHGARVGRLVSAIVLAFGLLWAPYHAVNLLQAVAALAPPEGALAKLGGAGQAARAGTTALAFFSSSVNPVLYVFTAGDLLPRAGPRFLTRLFEGSGEARGGGRSREGTMELRTTPQLKVVGQGRGNGDPGGGMEKDGPEWDL

SEQ ID NO: 2880 - protein, 2833 aa, Homo sapiens
MSGGAAEKQSSTPGSLFLSPPAPAPKNGSSSDSSVGEKLGAAAADAVTGRTEEYRRRRHTMDKDSRGAAATTTTTEHRFFRRSVICDSNATALELPGLPLSLPQPSIPAAVPQSAPPEPHREETVTATATSQVAQQPPAAAAPGEQAVAGPAPSTVPSSTSKDRPVSQPSLVGSKEEPPPARSGSGGGSAKEPQEERSQQQDDIEELETKAVGMSNDGRFLKFDIEIGRGSFKTVYKGLDTETTVEVAWCELQDRKLTKSERQRFKEEAEMLKGLQHPNIVRFYDSWESTVKGKKCIVLVTELMTSGTLKTYLKRFKVMKIKVLRSWCRQILKGLQFLHTRTPPIIHRDLKCDNIFITGPTGSVKIGDLGLATLKRASFAKSVIGTPEFMAPEMYEEKYDESVDVYAFGMCMLEMATSEYPYSECQNAAQIYRRVTSGVKPASFDKVAIPEVKEIIEGCIRQNKDERYSIKDLLNHAFFQEETGVRVELAEEDDGEKIAIKLWLRIEDIKKLKGKYKDNEAIEFSFDLERDVPEDVAQEMVESGYVCEGDHKTMAKAIKDRVSLIKRKREQRQLVREEQEKKKQEESSLKQQVEQSSASQTGIKQLPSASTGIPTASTTSASVSTQVEPEEPEADQHQQLQYQQPSISVLSDGTVDSGQGSSVFTESRVSSQQTVSYGSQHEQAHSTGTVPGHIPSTVQAQSQPHGVYPPSSVPQSMAHPCGGTPTYPESQIFFPTIHERPVSFSPPPTCPPKVAISQRRKSTSFLEAQTHHFQPLLRTVGQSLLPPGGSPTNWTPEAVVMLGTTASRVTGESCEIQVHPMFEPSQVYSDYRPGLVLPEEAHYFIPQEAVYVAGVHYQARVAEQYEGIPYNSSVLSSPMKQIPEQKPVQGGPTSSSVFEFPSGQAFLVGHLQNLRLDSGLGPGSPLSSISAPISTDATRLKFHPVFVPHSAPAVLTHNNESRSNCVFEFHVHTPSSSSGEGGGILPQRVYRNRQVAVDLNQEELPPQSVGLHGYLQPVTEEKHNYHAPELTVSVVEPIGQNWPIGSPEYSSDSSQITSSDPSDFQSPPPTGGAAAPFGSDVSMPFIHLPQTVLQESPLFFCFPQGTTSQQVLTASFSSGGSALHPQAQGQSQGQPSSSSLTGVSSSQPIQHPQQQQGIQQTAPPQQTVQYSLSQTSTSSEATTAQPVSQPQAPQVLPQVSAGKQLPVSQPVPTIQGEPQIPVATQPSVVPVHSGAHFLPVGQPLPTPLLPQYPVSQIPISTPHVSTAQTGFSSLPITMAAGITQPLLTLASSATTAAIPGVSTVVPSQLPTLLQPVTQLPSQVHPQLLQPAVQSMGIPANLGQAAEVPLSSGDVLYQGFPPRLPPQYPGDSNIAPSSNVASVCIHSTVLSPPMPTEVLATPGYFPTVVQPYVESNLLVPMGGVGGQVQVSQPGGSLAQAPTTSSQQAVLESTQGVSQVAPAEPVAVAQTQATQPTTLASSVDSAHSDVASGMSDGNENVPSSSGRHEGRTTKRHYRKSVRSRSRHEKTSRPKLRILNVSNKGDRVVECQLETHNRKMVTFKFDLDGDNPEEIATIMVNNDFILAIERESFVDQVREIIEKADEMLSEDVSVEPEGDQGLESLQGKDDYGFSGSQKLEGEFKQPIPASSMPQQIGIPTSSLTQVVHSAGRRFIVSPVPESRLRESKVFPSEITDTVAASTAQSPGMNLSHSASSLSLQQAFSELRRAQMTEGPNTAPPNFSHTGPTFPVVPPFLSSIAGVPTTAAATAPVPATSSPPNDISTSVIQSEVTVPTEEGIAGVATSTGVVTSGGLPIPPVSESPVLSSVVSSITIPAVVSISTTSPSLQVPTSTSEIVVSSTALYPSVTVSATSASAGGSTATPGPKPPAVVSQQAAGSTTVGATLTSVSTTTSFPSTASQLCIQLSSSTSTPTLAETVVVSAHSLDKTSHSSTTGLAFSLSAPSSSSSPGAGVSSYISQPGGLHPLVIPSVIASTPILPQAAGPTSTPLLPQVPSIPPLVQPVANVPAVQQTLIHSQPQPALLPNQPHTHCPEVDSDTQPKAPGIDDIKTLEEKLRSLFSEHSSSGAQHASVSLETSLVIESTVTPGIPTTAVAPSKLLTSTTSTCLPPTNLPLGTVALPVTPVVTPGQVSTPVSTTTSGVKPGTAPSKPPLTKAPVLPVGTELPAGTLPSEQLPPFPGPSLTQSQQPLEDLDAQLRRTLSPEMITVTSAVGPVSMAAPTAITEAGTQPQKGVSQVKEGPVLATSSGAGVFKMGRFQVSVAADGAQKEGKNKSEDAKSVHFESSTSESSVLSSSSPESTLVKPEPNGITIPGISSDVPESAHKTTASEAKSDTGQPTKVGRFQVTTTANKVGRFSVSKTEDKITDTKKEGPVASPPFMDLEQAVLPAVIPKKEKPELSEPSHLNGPSSDPEAAFLSRDVDDGSGSPHSPHQLSSKSLPSQNLSQSLSNSFNSSYMSSDNESDIEDEDLKLELRRLRDKHLKEIQDLQSRQKHEIESLYTKLGKVPPAVIIPPAAPLSGRRRRPTKSKGSKSSRSSSLGNKSPQLSGNLSGQSAASVLHPQQTLHPPGNIPESGQNQLLQPLKPSPSSDNLYSAFTSDGAISVPSLSAPGQGCAKFNCASEQVTFKPGGRRTRFLRKMVKKVCPCNQLCRTSSTNTVGATVNSQAAQAQPPAMTSSRKGTFTDDLHKLVDNWARDAMNLSGRRGSKGHMNYEGPGMARKFSAPGQLCISMTSNLGGSAPISAASATSLGHFTKSMCPPQQYGFPATPFGAQWSGTGGPAPQPLGQFQPVGTASLQNFNISNLQKSISNPPGSNLRTT

SEQ ID NO: 2881 - protein, 222 aa, Homo sapiens
MSSVQSQQEQLSQSDPSPSPNSCSSFELIDMDAGSLYEPVSPHWFYCKIIDSKETWIPFNSEDSQQLEEAYSSGKGCNGRVVPTDGGRYDVHLGERMRYAVYWDELASEVRRCTWFYKGDKDNKYVPYSESFSQVLEETYMLAVTLDEWKKKLESPNREIIILHNPKLMVHYQPVAGSDDWGSTPTEQGRPRTVKRGVENISVDIHCVNDFRSVSLNLLQTH

SEQ ID NO: 2882 - protein, 1313 aa, Homo sapiens
AAGALERSFVELSGAERERPRHFREFTVCSIGTANAVAGAVKYSESAGGFYYVESGKLFSVTRNRFIHWKTSGDTLELMEESLDINLLNNAIRLKFQNCSVLPGGVYVSETQNRVIILMLTNQTVHRLLLPHPSRMYRSELVVDSQMQSIFTDIGKVDFTDPCNYQLIPAVPGISPNSTASTAWLSSDGEALFALPCASGGIFVLKLPPYDIPGMVSVVELKQSSVMQRLLTGWMPTAIRGDQSPSDRPLSLAVHCVEHDAFIFALCQDHKLRMWSYKEQMCLMVADMLEYVPVKKDLRLTAGTGHKLRLAYSPTMGLYLGIYMHAPKRGQFCIFQLVSTESNRYSLDHISSLFTSQETLIDFALTSTDIWALWHDAENQTVVKYINFEHNVAGQWNPVFMQPLPEEEIVIRDDQDPREMYLQSLFTPGQFTNEALCKALQIFCRGTERNLDLSWSELKKEVTLAVENELQGSVTEYEFSQEEFRNLQQEFWCKFYACCLQYQEALSHPLALHLNPHTNMVCLLKKGYLSFLIPSSLVDHLYLLPYENLLTEDETTISDDVDIARDVICLIKCLRLIEESVTVDMSVIMEMSCYNLQSPEKAAEQILEDMITIDVENVMEDICSKLQEIRNPIHAIGLLIREMDYETEVEMEKGFNPAQPLNIRMNLTQLYGSNTAGYIVCRGVHKIASTRFLICRDLLILQQLLMRLGDAVIWGTGQLFQAQQDLLHRTAPLLLSYYLIKWGSECLATDVPLDTLESNLQHLSVLELTDSGALMANRFVSSPQTIVELFFQEVARKHIISHLFSQPKAPLSQTGLNWPEMITAITSYLLQLLWPSNPGCLFLECLMGNCQYVQLQDYIQLLHPWCQVNVGSCRFMLGRCYLVTGEGQKALECFCQAASEVGKEEFLDRLIRSEDGEIVSTPRLQYYDKVLRLLDVIGLPELVIQLATSAITEAGDDWKSQATLRTCIFKHHLDLGHNSQAYEALTQIPDSSRQLDCLRQLVVVLCERSQLQDLVEFPYVNLHNEVVGIIESRARAVDLMTHNYYELLYAFHIYRHNYRKAGTVMFEYGMRLGREVRTLRGLEKQGNCYLAALNCLRLIRPEYAWIVQPVSGAVYDRPGASPKRNHDGECTAAPTNRQIEILELEDLEKECSLARIRLTLAQHDPSAVAVAGSSSAEEMVTLLVQAGLFDTAISLCQTFKLPLTPVFEGLAFKCIKLQFGGEAAQAEAWAWLAANQLSSVITTKESSATDEAWRLLSTYLERYKVQNNLYHHCVINKLLSHGVPLPNWLINSYKDYQQKVDKATRDLLYRRTL

SEQ ID NO: 2883 - protein, 81 aa, Homo sapiens
MASPGKPGADEAQEEEGELEGGSAGPRAAILEQAEELFLLCDKEAKGFITKHDLQGLQSDLPLTPEQLEAVFESLDRAHTG

SEQ ID NO: 2884 - protein, 203 aa, Homo sapiens
QKYFRVASRDLQQLDDTTQLPLLSHFAETVEGLTTIRAFRYEARFQQKLLEYTDSNNIASLFLTAANRWLEVRMEYIGACVVLIAAVTSISNSLHRELSAGLVGLGLTYALMVSNYLNWMVRNLADMELQLGAVKRIHGLLKTEAESYEGLLARPPAPSLIPKNWPDQGKIQIQNLSVRYDSSLKPVLKHVNALIAPGQKIGI

SEQ ID NO: 2885 - protein, 579 aa, Homo sapiens
MDDSKQESTTSKEEETNIISSIVPSTQDIYQRQNSSDVHKSLLPAVDETTCGHTHFQQMIDKYINEANLIPEKTDLQELEHIFPNLHHQLFKPLEPHPDFDLSSSSSGISPDNRDFYQRSDSSSESHCATGLSKSTVYFTALRRTSMHSSLNTSPNQQPDTNLAHVGAHSFATENIIGGSEQCFEQLQPEYSSQEESQHADLPSIFSIEARDSSQGMKNQNYPSEEHTEILQNKKKIVHFQLSIGNLSSVYSSSDEANVFDQLNVQHSTPCGSNSSECSTKHQLESRKESMGFEELSKRGVVTMLQSQGLIEDNKNETCRVLDINPQVEETDSRLCVRTVEMGTSIQAPYSLTTQNEKYFENSAETDIPKITKKLSQLGESELFASSGSFSLQSSIPVWETETGHGIMEEPELTLISTTDTSIAEMDFANLTLEEKSENEAKCFFQVSEFLPLVSATEASDYPAVSELSIEKPRTASTAETPRRLTPVPGSLQEAFIKRKKSFMERSHQRQKEIRNKIHVSENSQIKTVKEKPSISSSVSRLKGVNKVRASFPEDRKTTQALRHQRGLRLYNQLAEVKQ

SEQ ID NO: 2886 - protein, 1134 aa, Homo sapiens
MVATLDTQIADDAELQKYSKLLPIHTLRLGVEVDSFDGHHYISSIVSGGPVDTLGLLQPEDELLEVNGMQLYGKSRREAVSFLKEVPPPFTLVCCRRLFDDEASVDEPRRTETSLPETEVDHNMDVNTEEDDDGELALWSPEVKIVELVKDCKGLGFSILDYQDPLDPTRSVIVIRSLVADGVAERSGGLLPGDRLVSVNEYCLDNTSLAEAVEILKAVPPGLVHLGICKPLVEDNEEESCYILHSSSNEDKTEFSGTIHDINSSLILEAPKGFRDEPYFKEELVDEPFLDLGKSFHSQQKEIEQSKEAWEMHEFLTPRLQEMDEEREILVDEEYELYQDPSPSMELYPLSHIQEATPVPSVNELHFGTQWLHDNEPSESQEARTGRTVYSQEAQPYGYCPENVMKENFVMESLPSVPSTEGNSQQGRFDDLENLNSLAKTSLDLGMIPNDVQGPSLLIDLPVVAQRREQEDLPLYQHQATRVISKASAYTGMLSSRYATDTCELPEREEGEGEETPNFSHWGPPRIVEIFREPNVSLGISIVGGQTVIKRLKNGEELKGIFIKQVLEDSPAGKTNALKTGDKILEVSGVDLQNASHSEAVEAIKNAGNPVVFIVQSLSSTPRVIPNVHNKANKITGNQNQDTQEKKEKRQGTAPPPMKLPPPYKALTDDSDENEEEDAFTDQKIRQRYADLPGELHIIELEKDKNGLGLSLAGNKDRSRMSIFVVGINPEGPAAADGRMRIGDELLEINNQILYGRSHQNASAIIKTAPSKVKLVFIRNEDAVNQMAVTPFPVPSSSPSSIEDQSGTEPISSEEDGSVEVGIKQLPESESFKLAVSQMKQQKYPTKVSFSSQEIPLAPASSYHSTDADFTGYGGFQAPLSVDPATCPIVPGQEMIIEISKGRSGLGLSIVGGKDTPLNAIVIHEVYEEGAAARDGRLWAGDQILEVNGVDLRNSSHEEAITALRQTPQKVRLVVYRDEAHYRDEENLEIFPVDLQKKAGRGLGLSIVGKRNGSGVFISDIVKGGAADLDGRLIQGDQILSVNGEDMRNASQETVATILKCAQGLVQLEIGRLRAGSWTSARTTSQNSQSAECTQQLSSLLRSCHHWPAKPGWHKKSFRSFPEKFRHRYGTKDC

SEQ ID NO: 2887 - protein, 940 aa, Homo sapiens
MPMWAGGVGSPRRGMAPASTDDLFARKLRQPARPPLTPHTFEPRPVRGPLLRSGSDAGEARPPTPASPRARAHSHEEASRPAATSTRLFTDPLALLGLPAEEPEPAFPPVLEPRWFAHYDVQSLLFDWAPRSQGMGSHSEASSGTLASAEDQAASSDLLHGAPGFVCELGGEGELGLGGPASPPVPPALPNAAVSILEEPQNRTSAYSLEHADLGAGYYRKYFYGKEHQNFFGMDESLGPVAVSLRREEKEGSGGGTLHSYRVIVRTTQLRTLRGTISEDALPPGPPRGLSPRKLLEHVAPQLSPSCLRLGSASPKVPRTLLTLDEQVLSFQRKVGILYCRAGQGSEEEMYNNQEAGPAFMQFLTLLGDVVRLKGFESYRAQLDTKTDSTGTHSLYTTYQDHEIMFHVSTMLPYTPNNQQQLLRKRHIGNDIVTIVFQEPGSKPFCPTTIRSHFQHVFLVVRAHTPCTPHTTYRVAVSRTQDTPAFGPALPAGGGPFAANADFRAFLLAKALNGEQAAGHARQFHAMATRTRQQYLQDLATNEQLDLYHGRGEAITLRFDGSPGQAVGEVVARLQLVSRGCETRELALPRDGQGRLGFEVDAEGFVTHVERFTFAETAGLRPGARLLRVCGQTLPSLRPEAAAQLLRSAPKVCVTVLPPDESGRPRRSFSELYTLSLQEPSRRGAPDPVQDEVQGVTLLPTTKQLLHLCLQDGGSPPGPGDLAEERTEFLHSQNSLSPRSSLSDEAPVLPNTTPDLLLATTAKPSVPSADSETPLTQDRPGSPSGSEDKGNPAPELRASFLPRTLSLRNSISRIMSEAGSGTLEDEWQAISEIASTCNTILESLSREGQPIPESGDPKGTPKSDAEPEPGNLSEKVSHLESMLRKLQEDLQKEKADRAALEEEVRSLRHNNRRLQAESESAATRLLLASKQLGSPTADLA

SEQ ID NO: 2888 - protein, 435 aa, Homo sapiens
MLRSTSTVTLLSGGAARTPGAPSRRANVCRLRLTVPPESPVPEQCEKKIERKEQLLDLSNGEPTRKLPQGVVYGVVRRSDQNQQKEMVVYGWSTSQLKEEMNYIKDVSHAQQEYLENHIQTQSSALDRFNAMNSALASDSIGLQKTLVDVTLENSNIKDQIRNLQQTYEASMDKLREKQRQLEVAQVENQLLKMKVESSQEANAEVMREMTKKLYSQYEEKLQEEQRKHSAEKEALLEETNSFLKAIEEANKKMQAAEISLEEKDQRIGELDRLIERMEKERHQLQLQLLEHETEMSGELTDSDKERYQQLEEASASLRERIRHLDDMVHCQQKKVKQMVEEIESLKKKLQQKQLLILQLLEKISFLEGENNELQSRLDYLTETQAKTEVETREIGVGCDLLPSQTGRTREIVMPSRNYTPYTRVLELTMKKTLT

SEQ ID NO: 2889 - protein, 144 aa, Homo sapiens
MKYWSCCRRKTSDFNTFLAQEGCTKGKHMWTKKDAGKKVVPCRHDWHQTGGEVTISVYAKNSLPELSRVEANSTLLNVHIVFEGEKEFDQNVKLWGVIDVKRSYVTMTATKIEITMRKAEPMQWASLELPAAKKQEKQKDATTD

SEQ ID NO: 2890 - protein, 240 aa, Homo sapiens
MRAAGVGLVDCHCHLSAPDFDRDLDDVLEKAKKANVVALVAVAEHSGEFEKIMQLSERYNGFVLPCLGVHPVQGLPPEDQRSVTLKDLDVALPIIENYKDRLLAIGEVGLDFSPRFAGTGEQKEEQRQVLIRQIQLAKRLNLPVNVHSRSAGRPTINLLQEQGAEKVLLHAFDGRPSVAMEGVRAGYFFSIPPSIIRSGQLLSLFSKKQKLVKQLPLTSICLETDSPALGPEKQQNILPR

SEQ ID NO: 2891 - protein, 47 aa, Homo sapiens
MEASVLSPTSWEKRRAWLRQSRNWQTQVLEEEAAAALQDVPDPEPSS

SEQ ID NO: 2892 - protein, 90 aa, Homo sapiens
MTSPEIASLSWGQMKVKGSNTTYKDCKVWPGGSRTWDWRETGTEVPSSTVEYLKKHGIDVRVLQTEQAVKEYNALVAQGVRVGGVFHSTC

SEQ ID NO: 2893 - protein, 3447 aa, Homo sapiens
MSGEDAEVRAVSEDVSNGSSGSPSPGDTLPWNLGKTQRSRRSGGGAGSNGSVLDPAERAVIRIADERDRVQKKTFTKWVNKHLIKAQRHISDLYEDLRDGHNLISLLEVLSGDSLPREKGRMRFHKLQNVQIALDYLRHRQVKLVNIRNDDIADGNPKLTLGLIWTIILHFQISDIQVSGQSEDMTAKEKLLLWSQRMVEGYQGLRCDNFTSSWRDGRLFNAIIHRHKPLLIDMNKVYRQTNLENLDQAFSVAERDLGVTRLLDPEDVDVPQPDEKSIITYVSSLYDAMPRVPDVQDGVRANELQLRWQEYRELVLLLLQWMRHHTAAFEERRFPSSFEEIEILWSQFLKFKEMELPAKEADKNRSKGIYQSLEGAVQAGQLKVPPGYHPLDVEKEWGKLHVAILEREKQLRSEFERLECLQRIVTKLQMEAGLCEEQLNQADALLQSDVRLLAAGKVPQRAGEVERDLDKADSMIRLLFNDVQTLKDGRHPQGEQMYRRVYRLHERLVAIRTEYNLRLKAGVAAPATQVAQVTLQSVQRRPELEDSTLRYLQDLLAWVEENQHRVDGAEWGVDLPSVEAQLGSHRGLHQSIEEFRAKIERARSDEGQLSPATRGAYRDCLGRLDLQYAKLLNSSKARLRSLESLHSFVAAATKELMWLNEKEEEEVGFDWSDRNTNMTAKKESYSALMRELELKEKKIKELQNAGDRLLREDHPARPTVESFQAALQTQWSWMLQLCCCIEAHLKENAAYFQFFSDVREAEGQLQKLQEALRRKYSCDRSATVTRLEDLLQDAQDEKEQLNEYKGHLSGLAKRAKAVVQLKPRHPAHPMRGRLPLLAVCDYKQVEVTVHKGDECQLVGPAQPSHWKVLSSSGSEAAVPSVCFLVPPPNQEAQEAVTRLEAQHQALVTLWHQLHVDMKSLLAWQSLRRDVQLIRSWSLATFRTLKPEEQRQALHSLELHYQAFLRDSQDAGGFGPEDRLMAEREYGSCSHHYQQLLQSLEQGAQEESRCQRCISELKDIRLQLEACETRTVHRLRLPLDKEPARECAQRIAEQQKAQAEVEGLGKGVARLSAEAEKVLALPEPSPAAPTLRSELELTLGKLEQVRSLSAIYLEKLKTISLVIRGTQGAEEVLRAHEEQLKEAQAVPATLPELEATKASLKKLRAQAEAQQPTFDALRDELRGAQEVGERLQQRHGERDVEVERWRERVAQLLERWQAVLAQTDVRQRELEQLGRQLRYYRESADPLGAWLQDARRRQEQIQAMPLADSQAVREQLRQEQALLEEIERHGEKVEECQRFAKQYINAIKDYELQLVTYKAQLEPVASPAKKPKVQSGSESVIQEYVDLRTHYSELTTLTSQYIKFISETLRRMEEEEMQTVQQEQLLQETQALQQSFLSEKDSLLQRERFIEQEKAKLEQLFQDEVAKAQQLREEQQRQQQQMEQERQRLVASMEEARRRQHEAEEGVRRKQEELQQLEQQRRQQEELLAEENQRLREQLQLLEEQHRAALAHSEEVTASQVAATKTLPNGRDALDGPAAEAEPEHSFDGLRRKVSAQRLQEAGILSAEELQRLAQGHTTVDELARREDVRHYLQGRSSIAGLLLKATNEKLSVYAALQRQLLSPGTALILLEAQAASGFLLDPVRNRRLTVNEAVKEGVVGPELHHKLLSAERAVTGYKDPYTGQQISLFQAMQKGLIVREHGIRLLEAQIATGGVIDPVHSHRVPVDVAYRRGYFDEEMNRVLADPSDDTKGFFDPNTHENLTYLQLLERCVEDPETGLCLLPLTDKAAKGGELVYTDSEARDVFEKATVSAPFGKFQGKTVTIWEIINSEYFTAEQRRDLLRQFRTGRITVEKIIKIIITVVEEQEQKGRLCFEGLRSLVPAAELLESRVIDRELYQQLQRGERSVRDVAEVDTVRRALRGANVIAGVWLEEAGQKLSIYNALKKDLLPSDMAVALLEAQAGTGHIIDPATSARLTVDEAVRAGLVGPEFHEKLLSAEKAVTGYRDPYTGQSVSLFQALKKGLIPREQGLRLLDAQLSTGGIVDPSKSHRVPLDVACARGCLDEETSRALSAPRADAKAYSDPSTGEPATYGELQQRCRPDQLTGLSLLPLSEKAARARQEELYSELQARETFEKTPVEVPVGGFKGRTVTVWELISSEYFTAEQRQELLRQFRTGKVTVEKVIKILITIVEEVETLRQERLSFSGLRAPVPASELLASGVLSRAQFEQLKDGKTTVKDLSELGSVRTLLQGSGCLAGIYLEDTKEKVSIYEAMRRGLLRATTAALLLEAQAATGFLVDPVRNQRLYVHEAVKAGVVGPELHEQLLSAEKAVTGYRDPYSGSTISLFQAMQKGLVLRQHGIRLLEAQIATGGIIDPVHSHRVPVDVAYQRGYFSEEMNRVLADPSDDTKGFFDPNTHENLTYRQLLERCVEDPETGLRLLPLKGAEKAEVVETTQVYTEEETRRAFEETQIDIPGGGSHGGSTMSLWEVMQSDLIPEEQRAQLMADFQAGRVTKERMIIIIIEIIEKTEIIRQQGLASYDYVRRRLTAEDLFEARIISLETYNLLREGTRSLREALEAESAWCYLYGTGSVAGVYLPGSRQTLSIYQALKKGLLSAEVARLLLEAQAATGFLLDPVKGERLTVDEAVRKGLVGPELHDRLLSAERAVTGYRDPYTEQTISLFQAMKKELIPTEEALRLLDAQLATGGIVDPRLGFHLPLEVAYQRGYLNKDTHDQLSEPSEVRSYVDPSTDERLSYTQLLRRCRRDDGTGQLLLPLSDARKLTFRGLRKQITMEELVRSQVMDEATALQLREGLTSIEEVTKNLQKFLEGTSCIAGVFVDATKERLSVYQAMKKGIIRPGTAFELLEAQAATGYVIDPIKGLKLTVEEAVRMGIVGPEFKDKLLSAERAVTGYKDPYSGKLISLFQAMKKGLILKDHGIRLLEAQIATGGIIDPEESHRLPVEVAYKRGLFDEEMNEILTDPSDDTKGFFDPNTEENLTYLQLMERCITDPQTGLCLLPLKEKKRERKTSSKSSVRKRRVVIVDPETGKEMSVYEAYRKGLIDHQTYLELSEQECEWEEITISSSDGVVKSMIIDRRSGRQYDIDDAIAKNLIDRSALDQYRAGTLSITEFADMLSGNAGGFRSRSSSVGSSSSYPISPAVSRTQLASWSDPTEETGPVAGILDTETLEKVSITEAMHRNLVDNITGQRLLEAQACTGGIIDPSTGERFPVTDAVNKGLVDKIMVDRINLAQKAFCGFEDPRTKTKMSAAQALKKGWLYYEAGQRFLEVQYLTGGLIEPDTPGRVPLDEALQRGTVDARTAQKLRDVGAYSKYLTCPKTKLKISYKDALDRSMVEEGTGLRLLEAAAQSTKGYYSPYSVSGSGSTAGSRTGSRTGSRAGSRRGSFDATGSGFSMTFSSSSYSSSGYGRRYASGSSASLGGPESAVA

SEQ ID NO: 2894 - protein, 503 aa, Homo sapiens
MALAPERAAPRVLFGEWLLGEISSGCYEGLQWLDEARTCFRVPWKHFARKDLSEADARIFKAWAVARGRWPPSSRGGGPPPEAETAERAGWKTNFRCALRSTRRFVMLRDNSGDPADPHKVYALSRELCWREGPGTDQTEAEAPAAVPPPQGGPPGPFLAHTHAGLQAPGPLPAPAGDKGDLLLQAVQQSCLADHLLTASWGADPVPTKAPGEGQEGLPLTGACAGGPGLPAGELYGWAVETTPSPGPQPAALTTGEAAAPESPHQAEPYLSPSPSACTAVQEPSPGALDVTIMYKGRTVLQKVVGHPSCTFLYGPPDPAVRATDPQQVAFPSPAELPDQKQLRYTEELLRHVAPGLHLELRGPQLWARRMGKCKVYWEVGGPPGSASPSTPACLLPRNCDTPIFDFRVFFQELVEFRARQRRGSPRYTIYLGFGQDLSAGRPKEKSLVLVKLEPWLCRVHLEGTQREGVSSLDSSSLSLCLSSANSLYDDIECFLMELEQPA

SEQ ID NO: 2895 - protein, 79 aa, Homo sapiens
ASVLSPTSWEKRRAWLRQSRNWQTQVLEEEAAAALQDVPDPEPSSLDDVFQEGNPINKIEDWLQDCGKLNTTDSHWKRI

SEQ ID NO: 2896 - protein, 147 aa, Homo sapiens
MDSLQKQDLRRPKIHGAVQASPYQPPTLASLQRLLWVRQAATLNHIDEVWPSLFLGDAYAARDKSKLIQLGITHVVNAAAGRVLVHCAMGVSRSATLVLAFLMICENMTLVEAIQTVQAHRNICPNSGFLRQLQVLDNRLGRETGRF

SEQ ID NO: 2897 - protein, 90 aa, Homo sapiens
MQPILLLLAFLLLPRADAGEIIGGHEAKPHSRPYMAYLMIWDQKSLKRCGGFLIRDDFVLTAAHCWGSWRERPSGPELCSPSGYLATRPR

SEQ ID NO: 2898 - protein, 215 aa, Homo sapiens
RDRIKLLFFDILVFLSVFLLFLLFLVDIMANNTTSLGSPWPENFWEDLIMSFTVSMAIGLVLGGFIWAVFICLSRRRRASAPISQWSSSRRSRSSYTHGLNRTGFYRHSGCERRSNLSLASLTFQRQASLEQANSFPRKSSFRASTFHPFLQCPPLPVETESQLVTLPSSNISPTISTSHSLSRPDYWSSNSLRVGLSTPPPPAYESIIKAFPDS

SEQ ID NO: 2899 - protein, 101 aa, Homo sapiens
MRAAGVGLVDCHCHLSAPDFDRDLDDVLEKAKKANVVALVAVAEHSGEFEKIMQLSERYNGFVLPCLGVHPVQGLPPEDQRSVTLKVLRRYCCMHLMVGHL

SEQ ID NO: 2900 - protein, 112 aa, Homo sapiens
MLKEEQEVAMLGVPHNPAPPMSTVIHIRSETSVPDHVVWSLFNTLFMNTCCLGFIAFAYSVKSRDRKMVGDVTGAQAYASTAKCLNIWALILGIFMTILLIIIPVLVVQAQR

SEQ ID NO: 2901 - protein, 379 aa, Homo sapiens
MLRSTSTVTLLSGGAARTPGAPSRRANVCRLRLTVPPESPVPEQCEKKIERKEQLLDLSNGEPTRKLPQGVVYGVVRRSDQNQQKEMVVYGWSTSQLKEEMNYIKDVRATLEKVRKRMYGDYDEMRQKIRQLTQELSVSHAQQEYLENHIQTQSSALDRFNAMNSALASDSIGLQKTLVDVTLENSNIKDQIRNLQQTYEASMDKLREKQRQLEVAQVENQLLKMKVESSQEANAEVMREMTKKLYSQYEEKLQEEQRKHSAEKEALLEETNSFLKAIEEANKKMQAAEISLEEKDQRIGELDRLIERMEKERHQLQLQLLEHETEMSGELTDSDKERYQQLEEASASLRERIRHLDDMVHCQQKKVKQMVEEVTFSTK

SEQ ID NO: 2902 - protein, 193 aa, Homo sapiens
MTRAGLSSTRRPVLARTHVQGRVYNFLERPTGWKCFVYHFAVFLIVLVCLIFSVLSTIEQYAALATGTLFWMEIVLVVFFGTEYVVRLWSAGCRSKYVGLWGRLRFARKPISIIDLIVVVASMVVLCVGSKGQVFATSAIRGIRFLQILRMLHVDRQGGTWRLLGSVVFIHRQELITTLYIGFLGLIFSSYFV

SEQ ID NO: 2903 - protein, 4570 aa, Homo sapiens
MSGEDAEVRAVSEDVSNGSSGSPSPGDTLPWNLGKTQRSRRSGGGAGSNGSVLDPAERAVIRIADERDRVQKKTFTKWVNKHLIKAQRHISDLYEDLRDGHNLISLLEVLSGDSLPREKGRMRFHKLQNVQIALDYLRHRQVKLVNIRNDDIADGNPKLTLGLIWTIILHFQISDIQVSGQSEDMTAKEKLLLWSQRMVEGYQGLRCDNFTSSWRDGRLFNAIIHRHKPLLIDMNKVYRQTNLENLDQAFSVAERDLGVTRLLDPEDVDVPQPDEKSIITYVSSLYDAMPRVPDVQDGELQLRWQEYRELVLLLLQWMRHHTAAFEERRFPSSFEEIEILWSQFLKFKEMELPAKEADKNRSKGIYQSLEGAVQAGQLKVPPGYHPLDVEKEWGKLHVAILEREKQLRSEFERLECLQRIVTKLQMEAGLCEEQLNQADALLQSDVRLLAAGKVPQRAGEVERDLDKADSMIRLLFNDVQTLKDGRHPQGEQMYRRVYRLHERLVAIRTEYNLRLKAGVAAPATQVAQVTLQSVQRRPELEDSTLRYLQDLLAWVEENQHRVDGAEWGVDLPSVEAQLGSHRGLHQSIEEFRAKIERARSDEGQLSPATRGAYRDCLGRLDLQYAKLLNSSKARLRSLESLHSFVAAATKELMWLNEKEEEEVGFDWSDRNTNMTAKKESYSALMRELELKEKKIKELQNAGDRLLREDHPARPTVESFQAALQTQWSWMLQLCCCIEAHLKENAAYFQFFSDVREAEGQLQKLQEALRRKYSCDRSATVTRLEDLLQDAQDEKEQLNEYKGHLSGLAKRAKAVVQLKPRHPAHPMRGRLPLLAVCDYKQVEVTVHKGDECQLVGPAQPSHWKVLSSSGSEAAVPSVCFLVPPPNQEAQEAVTRLEAQHQALVTLWHQLHVDMKSLLAWQSLRRDVQLIRSWSLATFRTLKPEEQRQALHSLELHYQAFLRDSQDAGGFGPEDRLMAEREYGSCSHHYQQLLQSLEQGAQEESRCQRCISELKDIRLQLEACETRTVHRLRLPLDKEPARECAQRIAEQQKAQAEVEGLGKGVARLSAEAEKVLALPEPSPAAPTLRSELELTLGKLEQVRSLSAIYLEKLKTISLVIRGTQGAEEVLRAHEEQLKEAQAVPATLPELEATKASLKKLRAQAEAQQPTFDALRDELRGAQEVGERLQQRHGERDVEVERWRERVAQLLERWQAVLAQTDVRQRELEQLGRQLRYYRESADPLGAWLQDARRRQEQIQAMPLADSQAVREQLRQEQALLEEIERHGEKVEECQRFAKQYINAIKDYELQLVTYKAQLEPVASPAKKPKVQSGSESVIQEYVDLRTHYSELTTLTSQYIKFISETLRRMEEEERLAEQQRAEERERLAEVEAALEKQRQLAEAHAQAKAQAEREAKELQQRMQEEVVRREEAAVDAQQQKRSIQEELQQLRQSSEAEIQAKARQAEAAERSRLRIEEEIRVVRLQLEATERQRGGAEGELQALRARAEEAEAQKRQAQEEAERLRRQVQDESQRKRQAEVELASRVKAEAEAAREKQRALQALEELRLQAEEAERRLRQAEVERARQVQVALETAQRSAEAELQSKRASFAEKTAQLERSLQEEHVAVAQLREEAERRAQQQAEAERAREEAERELERWQLKANEALRLRLQAEEVAQQKSLAQAEAEKQKEEAEREARRRGKAEEQAVRQRELAEQELEKQRQLAEGTAQQRLAAEQELIRLRAETEQGEQQRQLLEEELARLQREAAAATQKRQELEAELAKVRAEMEVLLASKARAEEESRSTSEKSKQRLEAEAGRFRELAEEAARLRALAEEAKRQRQLAEEDAARQRAEAERVLAEKLAAIGEATRLKTEAEIALKEKEAENERLRRLAEDEAFQRRRLEEQAAQHKADIEERLAQLRKASDSELERQKGLVEDTLRQRRQVEEEILALKASFEKAAAGKAELELELGRIRSNAEDTLRSKEQAELEAARQRQLAAEEERRRREAEERVQKSLAAEEEAARQRKAALEEVERLKAKVEEARRLRERAEQESARQLQLAQEAAQKRLQAEEKAHAFAVQQKEQELQQTLQQEQSVLDQLRGEAEAARRAAEEAEEARVQAEREAAQSRRQVEEAERLKQSAEEQAQARAQAQAAAEKLRKEAEQEAARRAQAEQAALRQKQAADAEMEKHKKFAEQTLRQKAQVEQELTTLRLQLEETDHQKNLLDEELQRLKAEATEAARQRSQVEEELFSVRVQMEELSKLKARIEAENRALILRDKDNTQRFLQEEAEKMKQVAEEAARLSVAAQEAARLRQLAEEDLAQQRALAEKMLKEKMQAVQEATRLKAEAELLQQQKELAQEQARRLQEDKEQMAQQLAEETQGFQRTLEAERQRQLEMSAEAERLKLRVAEMSRAQARAEEDAQRFRKQAEEIGEKLHRTELATQEKVTLVQTLEIQRQQSDHDAERLREAIAELEREKEKLQQEAKLLQLKSEEMQTVQQEQLLQETQALQQSFLSEKDSLLQRERFIEQEKAKLEQLFQDEVAKAQQLREEQQRQQQQMEQERQRLVASMEEARRRQHEAEEGVRRKQEELQQLEQQRRQQEELLAEENQRLREQLQLLEEQHRAALAHSEEVTASQVAATKTLPNGRDALDGPAAEAEPEHSFDGLRRKVSAQRLQEAGILSAEELQRLAQGHTTVDELARREDVRHYLQGRSSIAGLLLKATNEKLSVYAALQRQLLSPGTALILLEAQAASGFLLDPVRNRRLTVNEAVKEGVVGPELHHKLLSAERAVTGYKDPYTGQQISLFQAMQKGLIVREHGIRLLEAQIATGGVIDPVHSHRVPVDVAYRRGYFDEEMNRVLADPSDDTKGFFDPNTHENLTYLQLLERCVEDPETGLCLLPLTDKAAKGGELVYTDSEARDVFEKATVSAPFGKFQGKTVTIWEIINSEYFTAEQRRDLLRQFRTGRITVEKIIKIIITVVEEQEQKGRLCFEGLRSLVPAAELLESRVIDRELYQQLQRGERSVRDVAEVDTVRRALRGANVIAGVWLEEAGQKLSIYNALKKDLLPSDMAVALLEAQAGTGHIIDPATSARLTVDEAVRAGLVGPEFHEKLLSAEKAVTGYRDPYTGQSVSLFQALKKGLIPREQGLRLLDAQLSTGGIVDPSKSHRVPLDVACARGCLDEETSRALSAPRADAKAYSDPSTGEPATYGELQQRCRPDQLTGLSLLPLSEKAARARQEELYSELQARETFEKTPVEVPVGGFKGRTVTVWELISSEYFTAEQRQELLRQFRTGKVTVEKVIKILITIVEEVETLRQERLSFSGLRAPVPASELLASGVLSRAQFEQLKDGKTTVKDLSELGSVRTLLQGSGCLAGIYLEDTKEKVSIYEAMRRGLLRATTAALLLEAQAATGFLVDPVRNQRLYVHEAVKAGVVGPELHEQLLSAEKAVTGYRDPYSGSTISLFQAMQKGLVLRQHGIRLLEAQIATGGIIDPVHSHRVPVDVAYQRGYFSEEMNRVLADPSDDTKGFFDPNTHENLTYRQLLERCVEDPETGLRLLPLKGAEKAEVVETTQVYTEEETRRAFEETQIDIPGGGSHGGSTMSLWEVMQSDLIPEEQRAQLMADFQAGRVTKERMIIIIIEIIEKTEIIRQQGLASYDYVRRRLTAEDLFEARIISLETYNLLREGTRSLREALEAESAWCYLYGTGSVAGVYLPGSRQTLSIYQALKKGLLSAEVARLLLEAQAATGFLLDPVKGERLTVDEAVRKGLVGPELHDRLLSAERAVTGYRDPYTEQTISLFQAMKKELIPTEEALRLLDAQLATGGIVDPRLGFHLPLEVAYQRGYLNKDTHDQLSEPSEVRSYVDPSTDERLSYTQLLRRCRRDDGTGQLLLPLSDARKLTFRGLRKQITMEELVRSQVMDEATALQLREGLTSIEEVTKNLQKFLEGTSCIAGVFVDATKERLSVYQAMKKGIIRPGTAFELLEAQAATGYVIDPIKGLKLTVEEAVRMGIVGPEFKDKLLSAERAVTGYKDPYSGKLISLFQAMKKGLILKDHGIRLLEAQIATGGIIDPEESHRLPVEVAYKRGLFDEEMNEILTDPSDDTKGFFDPNTEENLTYLQLMERCITDPQTGLCLLPLKEKKRERKTSSKSSVRKRRVVIVDPETGKEMSVYEAYRKGLIDHQTYLELSEQECEWEEITISSSDGVVKSMIIDRRSGRQYDIDDAIAKNLIDRSALDQYRAGTLSITEFADMLSGNAGGFRSRSSSVGSSSSYPISPAVSRTQLASWSDPTEETGPVAGILDTETLEKVSITEAMHRNLVDNITGQRLLEAQACTGGIIDPSTGERFPVTDAVNKGLVDKIMVDRINLAQKAFCGFEDPRTKTKMSAAQALKKGWLYYEAGQRFLEVQYLTGGLIEPDTPGRVPLDEALQRGTVDARTAQKLRDVGAYSKYLTCPKTKLKISYKDALDRSMVEEGTGLRLLEAAAQSTKGYYSPYSVSGSGSTAGSRTGSRTGSRAGSRRGSFDATGSGFSMTFSSSSYSSSGYGRRYASGSSASLGGPESAVA

SEQ ID NO: 2904 - protein, 26926 aa, Homo sapiens
MTTQAPTFTQPLQSVVVLEGSTATFEAHISGFPVPEVSWFRDGQVISTSTLPGVQISFSDGRAKLTIPAVTKANSGRYSLKATNGSGQATSTAELLVKAETAPPNFVQRLQSMTVRQGSQVRLQVRVTGIPTPVVKFYRDGAEIQSSLDFQISQEGDLYSLLIAEAYPEDSGTYSVNATNSVGRATSTAELLVQGEEEVPAKKTKTIVSTAQISESRQTRIEKKIEAHFDARSIATVEMVIDGAAGQQLPHKTPPRIPPKPKSRSPTPPSIAAKAQLARQQSPSPIRHSPSPVRHVRAPTPSPVRSVSPAARISTSPIRSVRSPLLMRKTQASTVATGPEVPPPWKQEGYVASSSEAEMRETTLTTSTQIRTEERWEGRYGVQEQVTISGAAGAAASVSASASYAAEAVATGAKEVKQDADKSAAVATVVAAVDMARVREPVISAVEQTAQRTTTTAVHIQPAQEQVRKEAEKTAVTKVVVAADKAKEQELKSRTKEVITTKQEQMHVTHEQIRKETEKTFVPKVVISAAKAKEQETRISEEITKKQKQVTQEAIMKETRKTVVPKVIVATPKVKEQDLVSRGREGITTKREQVQITQEKMRKEAEKTALSTIAVATAKAKEQETILRTRETMATRQEQIQVTHGKVDVGKKAEAVATVVAAVDQARVREPREPGHLEESYAQQTTLEYGYKERISAAKVAEPPQRPASEPHVVPKAVKPRVIQAPSETHIKTTDQKGMHISSQIKKTTDLTTERLVHVDKRPRTASPHFTVSKISVPKTEHGYEASIAGSAIATLQKELSATSSAQKITKSVKAPTVKPSETRVRAEPTPLPQFPFADTPDTYKSEAGVEVKKEVGVSITGTTVREERFEVLHGREAKVTETARVPAPVEIPVTPPTLVSGLKNVTVIEGESVTLECHISGYPSPTVTWYREDYQIESSIDFQITFQSGIARLMIREAFAEDSGRFTCSAVNEAGTVSTSCYLAVQVSEEFEKETTAVTEKFTTEEKRFVESRDVVMTDTSLTEEQAGPGEPAAPYFITKPVVQKLVEGGSVVFGCQVGGNPKPHVYWKKSGVPLTTGYRYKVSYNKQTGECKLVISMTFADDAGEYTIVVRNKHGETSASASLLEEADYELLMKSQQEMLYQTQVTAFVQEPKVGETAPGFVYSEYEKEYEKEQALIRKKMAKDTVVVRTYVEDQEFHISSFEERLIKEIEYRIIKTTLEELLEEDGEEKMAVDISESEAVESGFDSRIKNYRILEGMGVTFHCKMSGYPLPKIAWYKDGKRIKHGERYQMDFLQDGRASLRIPVVLPEDEGIYTAFASNIKGNAICSGKLYVEPAAPLGAPTYIPTLEPVSRIRSLSPRSVSRSPIRMSPARMSPARMSPARMSPARMSPGRRLEETDESQLERLYKPVFVLKPVSFKCLEGQTARFDLKVVGRPMPETFWFHDGQQIVNDYTHKVVIKEDGTQSLIIVPATPSDSGEWTVVAQNRAGRSSISVILTVEAVEHQVKPMFVEKLKNVNIKEGSRLEMKVRATGNPNPDIVWLKNSDIIVPHKYPKIRIEGTKGEAALKIDSTVSQDSAWYTATAINKAGRDTTRCKVNVEVEFAEPEPERKLIIPRGTYRAKEIAAPELEPLHLRYGQEQWEEGDLYDKEKQQKPFFKKKLTSLRLKRFGPAHFECRLTPIGDPTMVVEWLHDGKPLEAANRLRMINEFGYCSLDYGVAYSRDSGIITCRATNKYGTDHTSATLIVKDEKSLVEESQLPEGRKGLQRIEELERMAHEGALTGVTTDQKEKQKPDIVLYPEPVRVLEGETARFRCRVTGYPQPKVNWYLNGQLIRKSKRFRVRYDGIHYLDIVDCKSYDTGEVKVTAENPEGVIEHKVKLEIQQREDFRSVLRRAPEPRPEFHVHEPGKLQFEVQKVDRPVDTTETKEVVKLKRAERITHEKVPEESEELRSKFKRRTEEGYYEAITAVELKSRKKDESYEELLRKTKDELLHWTKELTEEEKKALAEEGKITIPTFKPDKIELSPSMEAPKIFERIQSQTVGQGSDAHFRVRVVGKPDPECEWYKNGVKIERSDRIYWYWPEDNVCELVIRDVTAEDSASIMVKAINIAGETSSHAFLLVQAKQLITFTQELQDVVAKEKDTMATFECETSEPFVKVKWYKDGMEVHEGDKYRMHSDRKVHFLSILTIDTSDAEDYSCVLVEDENVKTTAKLIVEGAVVEFVKELQDIEVPESYSGELECIVSPENIEGKWYHNDVELKSNGKYTITSRRGRQNLTVKDVTKEDQGEYSFVIDGKKTTCKLKMKPRPIAILQGLSDQKVCEGDIVQLEVKVSLESVEGVWMKDGQEVQPSDRVHIVIDKQSHMLLIEDMTKEDAGNYSFTIPALGLSTSGRVSVYSVDVITPLKDVNVIEGTKAVLECKVSVPDVTSVKWYLNDEQIKPDDRVQAIVKGTKQRLVINRTHASDEGPYKLIVGRVETNCNLSVEKIKIIRGLRDLTCTETQNVVFEVELSHSGIDVLWNFKDKEIKPSSKYKIEAHGKIYKLTVLNMMKDDEGKYTFYAGENMTSGKLTVAGGAISKPLTDQTVAESQEAVFECEVANPDSKGEWLRDGKHLPLTNNIRSESDGHKRRLIIAATKLDDIGEYTYKVATSKTSAKLKVEAVKIKKTLKNLTVTETQDAVFTVELTHPNVKGVQWIKNGVVLESNEKYAISVKGTIYSLRIKNCAIVDESVYGFRLGRLGASARLHVETVKIIKKPKDVTALENATVAFEVSVSHDTVPVKWFHKSVEIKPSDKHRLVSERKVHKLMLQNISPSDAGEYTAVVGQLECKAKLFVETLHITKTMKNIEVPETKTASFECEVSHFNVPSMWLKNGVEIEMSEKFKIVVQGKLHQLIIMNTSTEDSAEYTFVCGNDQVSATLTVTPIMITSMLKDINAEEKDTITFEVTVNYEGISYKWLKNGVEIKSTDKCQMRTKKLTHSLNIRNVHFGDAADYTFVAGKATSTATLYVEARHIEFRKHIKDIKVLEKKRAMFECEVSEPDITVQWMKDDQELQITDRIKIQKEKYVHRLLIPSTRMSDAGKYTVVAGGNVSTAKLFVEGRDVRIRSIKKEVQVIEKQRAVVEFEVNEDDVDAHWYKDGIEINFQVQERHKYVVERRIHRMFISETRQSDAGEYTFVAGRNRSSVTLYVNAPEPPQVLQELQPVTVQSGKPARFCAVISGRPQPKISWYKEEQLLSTGFKCKFLHDGQEYTLLLIEAFPEDAAVYTCEAKNDYGVATTSASLSVEVPEVVSPDQEMPVYPPAIITPLQDTVTSEGQPARFQCRVSGTDLKVSWYSKDKKIKPSRFFRMTQFEDTYQLEIAEAYPEDEGTYTFVASNAVGQVSSTANLSLEAPESILHERIEQEIEMEMKEFSSSFLSAEEEGLHSAELQLSKINETLELLSESPVYPTKFDSEKEGTGPIFIKEVSNADISMGDVATLSVTVIGIPKPKIQWFFNGVLLTPSADYKFVFDGDDHSLIILFTKLEDEGEYTCMASNDYGKTICSAYLKINSKGEGHKDTETESAVAKSLEKLGGPCPPHFLKELKPIRCAQGLPAIFEYTVVGEPAPTVTWFKENKQLCTSVYYTIIHNPNGSGTFIVNDPQREDSGLYICKAENMLGESTCAAELLVLLEDTDMTDTPCKAKSTPEAPEDFPQTPLKGPAVEALDSEQEIATFVKDTILKAALITEENQQLSYEHIAKANELSSQLPLGAQELQSILEQDKLTPESTREFLCINGSIHFQPLKEPSPNLQLQIVQSQKTFSKEGILMPEEPETQAVLSDTEKIFPSAMSIEQINSLTVEPLKTLLAEPEGNYPQSSIEPPMHSYLTSVAEEVLSPKEKTVSDTNREQRVTLQKQEAQSALILSQSLAEGHVESLQSPDVMISQVNYEPLVPSEHSCTEGGKILIESANPLENAGQDSAVRIEEGKSLRFPLALEEKQVLLKEEHSDNVVMPPDQIIESKREPVAIKKVQEVQGRDLLSKESLLSGIPEEQRLNLKIQICRALQAAVASEQPGLFSEWLRNIEKVEVEAVNITQEPRHIMCMYLVTSAKSVTEEVTIIIEDVDPQMANLKMELRDALCAIIYEEIDILTAEGPRIQQGAKTSLQEEMDSFSGSQKVEPITEPEVESKYLISTEEVSYFNVQSRVKYLDATPVTKGVASAVVSDEKQDESLKPSEEKEESSSESGTEEVATVKIQEAEGGLIKEDGPMIHTPLVDTVSEEGDIVHLTTSITNAKEVNWYFENKLVPSDEKFKCLQDQNTYTLVIDKVNTEDHQGEYVCEALNDSGKTATSAKLTVVKRAAPVIKRKIEPLEVALGHLAKFTCEIQSAPNVRFQWFKAGREIYESDKCSIRSSKYISSLEILRTQVVDCGEYTCKASNEYGSVSCTATLTVTVPGGEKKVRKLLPERKPEPKEEVVLKSVLRKRPEEEEPKVEPKKLEKVKKPAVPEPPPPKPVEEVEVPTVTKRERKIPEPTKVPEIKPAIPLPAPEPKPKPEAEVKTIKPPPVEPEPTPIAAPVTVPVVGKKAEAKAPKEEAAKPKGPIKGVPKKTPSPIEAERRKLRPGSGGEKPPDEAPFTYQLKAVPLKFVKEIKDIILTESEFVGSSAIFECLVSPSTAITTWMKDGSNIRESPKHRFIADGKDRKLHIIDVQLSDAGEYTCVLRLGNKEKTSTAKLVVEELPVRFVKTLEEEVTVVKGQPLYLSCELNKERDVVWRKDGKIVVEKPGRIVPGVIGLMRALTINDADDTDAGTYTVTVENANNLECSSCVKVVEVIRDWLVKPIRDQHVKPKGTAIFACDIAKDTPNIKWFKGYDEIPAEPNDKTEILRDGNHLYLKIKNAMPEDIAEYAVEIEGKRYPAKLTLGEREVELLKPIEDVTIYEKESASFDAEISEADIPGQWKLKGELLRPSPTCEIKAEGGKRFLTLHKVKLDQAGEVLYQALNAITTAILTVKEIELDFAVPLKDVTVPERRQARFECVLTREANVIWSKGPDIIKSSDKFDIIADGKKHILVINDSQFDDEGVYTAEVEGKKTSARLFVTGIRLKFMSPLEDQTVKEGETATFVCELSHEKMHVVWFKNDAKLHTSRTVLISSEGKTHKLEMKEVTLDDISQIKAQVKELSSTAQLKVLEADPYFTVKLHDKTAVEKDEITLKCEVSKDVPVKWFKDGEEIVPSPKYSIKADGLRRILKIKKADLKDKGEYVCDCGTDKTKANVTVEARLIKVEKPLYGVEVFVGETAHFEIELSEPDVHGQWKLKGQPLTASPDCEIIEDGKKHILILHNCQLGMTGEVSFQAANAKSAANLKVKELPLIFITPLSDVKVFEKDEAKFECEVSREPKTFRWLKGTQEITGDDRFELIKDGTKHSMVIKSAAFEDEAKYMFEAEDKHTSGKLIIEGIRLKFLTPLKDVTAKEKESAVFTVELSHDNIRVKWFKNDQRLHTTRSVSMQDEGKTHSITFKDLSIDDTSQIRVEAMGMSSEAKLTVLEGDPYFTGKLQDYTGVEKDEVILQCEISKADAPVKWFKDGKEIKPSKNAVIKADGKKRMLILKKALKSDIGQYTCDCGTDKTSGKLDIEDREIKLVRPLHSVEVMETETARFETEISEDDIHANWKLKGEALLQTPDCEIKEEGKIHSLVLHNCRLDQTGGVDFQAANVKSSAHLRVKPRVIGLLRPLKDVTVTAGETATFDCELSYEDIPVEWYLKGKKLEPSDKVVPRSEGKVHTLTLRDVKLEDAGEVQLTAKDFKTHANLFVKEPPVEFTKPLEDQTVEEGATAVLECEVSRENAKVKWFKNGTEILKSKKYEIVADGRVRKLVIHDCTPEDIKTYTCDAKDFKTSCNLNVVPPHVEFLRPLTDLQVREKEMARFECELSRENAKVKWFKDGAEIKKGKKYDIISKGAVRILVINKCLLDDEAEYSCEVRTARTSGMLTVLEEEAVFTKNLANIEVSETDTIKLVCEVSKPGAEVIWYKGDEEIIETGRYEILTEGRKRILVIQNAHLEDAGNYNCRLPSSRTDGKVKVHELAAEFISKPQNLEILEGEKAEFVCSISKESFPVQWKRDDKTLESGDKYDVIADGKKRVLVVKDATLQDMGTYVVMVGAARAAAHLTVIEKLRIVVPLKDTRVKEQQEVVFNCEVNTEGAKAKWFRNEEAIFDSSKYIILQKDLVYTLRIRDAHLDDQANYNVSLTNHRGENVKSAANLIVEEEDLRIVEPLKDIETMEKKSVTFWCKVNRLNVTLKWTKNGEEVPFDNRVSYRVDKYKHMLTIKDCGFPDEGEYIVTAGQDKSVAELLIIEAPTEFVEHLEDQTVTEFDDAVFSCQLSREKANVKWYRNGREIKEGKKYKFEKDGSIHRLIIKDCRLDDECEYACGVEDRKSRARLFVEEIPVEIIRPPQDILEAPGADVVFLAELNKDKVEVQWLRNNMVVVQGDKHQMMSEGKIHRLQICDIKPRDQGEYRFIAKDKEARAKLELAAAPKIKTADQDLVVDVGKPLTMVVPYDAYPKAEAEWFKENEPLSTKTIDTTAEQTSFRILEAKKGDKGRYKIVLQNKHGKAEGFINLKVIDVPGPVRNLEVTETFDGEVSLAWEEPLTDGGSKIIGYVVERRDIKRKTWVLATDRAESCEFTVTGLQKGGVEYLFRVSARNRVGTGEPVETDNPVEARSKYDVPGPPLNVTITDVNRFGVSLTWEPPEYDGGAEITNYVIELRDKTSIRWDTAMTVRAEDLSATVTDVVEGQEYSFRVRAQNRIGVGKPSAATPFVKVADPIERPSPPVNLTSSDQTQSSVQLKWEPPLKDGGSPILGYIIERCEEGKDNWIRCNMKLVPELTYKVTGLEKGNKYLYRVSAENKAGVSDPSEILGPLTADDAFVEPTMDLSAFKDGLEVIVPNPITILVPSTGYPRPTATWCFGDKVLETGDRVKMKTLSAYAELVISPSERSDKGIYTLKLENRVKTISGEIDVNVIARPSAPKELKFGDITKDSVHLTWEPPDDDGGSPLTGYVVEKREVSRKTWTKVMDFVTDLEFTVPDLVQGKEYLFKVCARNKCGPGEPAYVDEPVNMSTPATVPDPPENVKWRDRTANSIFLTWDPPKNDGGSRIKGYIVERCPRGSDKWVACGEPVAETKMEVTGLEEGKWYAYRVKALNRQGASKPSRPTEEIQAVDTQEAPEIFLDVKLLAGLTVKAGTKIELPATVTGKPEPKITWTKADMILKQDKRITIENVPKKSTVTIVDSKRSDTGTYIIEAVNVCGRATAVVEVNVLDKPGPPAAFDITDVTNESCLLTWNPPRDDGGSKITNYVVERRATDSEVWHKLSSTVKDTNFKATKLIPNKEYIFRVAAENMYGVGEPVQASPITAKYQFDPPGPPTRLEPSDITKDAVTLTWCEPDDDGGSPITGYWVERLDPDTDKWVRCNKMPVKDTTYRVKGLTNKKKYRFRVLAENLAGPGKPSKSTEPILIKDPIDPPWPPGKPTVKDVGKTSVRLNWTKPEHDGGAKIESYVIEMLKTGTDEWVRVAEGVPTTQHLLPGLMEGQEYSFRVRAVNKAGESEPSEPSDPVLCREKLYPPSPPRWLEVINITKNTADLKWTVPEKDGGSPITNYIVEKRDVRRKGWQTVDTTVKDTKCTVTPLTEGSLYVFRVAAENAIGQSDYTEIEDSVLAKDTFTTPGPPYALAVVDVTKRHVDLKWEPPKNDGGRPIQRYVIEKKERLGTRWVKAGKTAGPDCNFRVTDVIEGTEVQFQVRAENEAGVGHPSEPTEILSIEDPTSPPSPPLDLHVTDAGRKHIAIAWKPPEKNGGSPIIGYHVEMCPVGTEKWMRVNSRPIKDLKFKVEEGVVPDKEYVLRVRAVNAIGVSEPSEISENVVAKDPDCKPTIDLETHDIIVIEGEKLSIPVPFRAVPVPTVSWHKDGKEVKASDRLTMKNDHISAHLEVPKSVRADAGIYTITLENKLGSATASINVKVIGLPGPCKDIKASDITKSSCKLTWEPPEFDGGTPILHYVLERREAGRRTYIPVMSGENKLSWTVKDLIPNGEYFFRVKAVNKVGGGEYIELKNPVIAQDPKQPPDPPVDVEVHNPTAEAMTITWKPPLYDGGSKIMGYIIEKIAKGEERWKRCNEHLVPILTYTAKGLEEGKEYQFRVRAENAAGISEPSRATPPTKAVDPIDAPKVILRTSLEVKRGDEIALDASISGSPYPTITWIKDENVIVPEEIKKRAAPLVRRRKGEVQEEEPFVLPLTQRLSIDNSKKGESQLRVRDSLRPDHGLYMIKVENDHGIAKAPCTVSVLDTPGPPINFVFEDIRKTSVLCKWEPPLDDGGSEIINYTLEKKDKTKPDSEWIVVTSTLRHCKYSVTKLIEGKEYLFRVRAENRFGPGPPCVSKPLVAKDPFGPPDAPDKPIVEDVTSNSMLVKWNEPKDNGSPILGYWLEKREVNSTHWSRVNKSLLNALKANVDGLLEGLTYVFRVCAENAAGPGKFSPPSDPKTAHDPISPPGPPIPRVTDTSSTTIELEWEPPAFNGGGEIVGYFVDKQLVGTNEWSRCTEKMIKVRQYTVKEIREGADYKLRVSAVNAAGEGPPGETQPVTVAEPQEPPAVELDVSVKGGIQIMAGKTLRIPAVVTGRPVPTKVWTKEEGELDKDRVVIDNVGTKSELIIKDALRKDHGRYVITATNSCGSKFAAARVEVFDVPGPVLDLKPVVTNRKMCLLNWSDPEDDGGSEITGFIIERKDAKMHTWRQPIETERSKCDITGLLEGQEYKFRVIAKNKFGCGPPVEIGPILAVDPLGPPTSPERLTYTERTKSTITLDWKEPRSNGGSPIQGYIIEKRRHDKPDFERVNKRLCPTTSFLVENLDEHQMYEFRVKAVNEIGESEPSLPLNVVIQDDEVPPTIKLRLSVRGDTIKVKAGEPVHIPADVTGLPMPKIEWSKNETVIEKPTDALQITKEEVSRSEAKTELSIPKAVREDKGTYTVTASNRLGSVFRNVHVEVYDRPSPPRNLAVTDIKAESCYLTWDAPLDNGGSEITHYVIDKRDASRKKAEWEEVTNTAVEKRYGIWKLIPNGQYEFRVRAVNKYGISDECKSDKVVIQDPYRLPGPPGKPKVLARTKGSMLVSWTPPLDNGGSPITGYWLEKREEGSPYWSRVSRAPITKVGLKGVEFNVPRLLEGVKYQFRAMAINAAGIGPPSEPSDPEVAGDPIFPPGPPSCPEVKDKTKSSISLGWKPPAKDGGSPIKGYIVEMQEEGTTDWKRVNEPDKLITTCECVVPNLKELRKYRFRVKAVNEAGESEPSDTTGEIPATDIQEEPEVFIDIGAQDCLVCKAGSQIRIPAVIKGRPTPKSSWEFDGKAKKAMKDGVHDIPEDAQLETAENSSVIIIPECKRSHTGKYSITAKNKAGQKTANCRVKVMDVPGPPKDLKVSDITRGSCRLSWKMPDDDGGDRIKGYVIEKRTIDGKAWTKVNPDCGSTTFVVPDLLSEQQYFFRVRAENRFGIGPPVETIQRTTARDPIYPPDPPIKLKIGLITKNTVHLSWKPPKNDGGSPVTHYIVECLAWDPTGTKKEAWRQCNKRDVEELQFTVEDLVEGGEYEFRVKAVNAAGVSKPSATVGPVTVKDQTCPPSIDLKEFMEVEEGTNVNIVAKIKGVPFPTLTWFKAPPKKPDNKEPVLYDTHVNKLVVDDTCTLVIPQSRRSDTGLYTITAVNNLGTASKEMRLNVLGRPGPPVGPIKFESVSADQMTLSWFPPKDDGGSKITNYVIEKREANRKTWVHVSSEPKECTYTIPKLLEGHEYVFRIMAQNKYGIGEPLDSEPETARNLFSVPGAPDKPTVSSVTRNSMTVNWEEPEYDGGSPVTGYWLEMKDTTSKRWKRVNRDPIKAMTLGVSYKVTGLIEGSDYQFRVYAINAAGVGPASLPSDPATARDPIAPPGPPFPKVTDWTKSSADLEWSPPLKDGGSKVTGYIVEYKEEGKEEWEKGKDKEVRGTKLVVTGLKEGAFYKFRVRAVNIAGIGEPGEVTDVIEMKDRLVSPDLQLDASVRDRIVVHAGGVIRIIAYVSGKPPPTVTWNMNERTLPQEATIETTAISSSMVIKNCQRSHQGVYSLLAKNEAGERKKTIIVDVLDVPGPVGTPFLAHNLTNESCKLTWFSPEDDGGSPITNYVIEKRESDRRAWTPVTYTVTRQNATVQGLIQGKAYFFRIAAENSIGMGPFVETSEALVIREPITVPERPEDLEVKEVTKNTVTLTWNPPKYDGGSEIINYVLESRLIGTEKFHKVTNDNLLSRKYTVKGLKEGDTYEYRVSAVNIVGQGKPSFCTKPITCKDELAPPTLHLDFRDKLTIRVGEAFALTGRYSGKPKPKVSWFKDEADVLEDDRTHIKTTPATLALEKIKAKRSDSGKYCVVVENSTGSRKGFCQVNVVDRPGPPVGPVSFDEVTKDYMVISWKPPLDDGGSKITNYIIEKKEVGKDVWMPVTSASAKTTCKVSKLLEGKDYIFRIHAENLYGISDPLVSDSMKAKDRFRVPDAPDQPIVTEVTKDSALVTWNKPHDGGKPITNYILEKRETMSKRWARVTKDPIHPYTKFRVPDLLEGCQYEFRVSAENEIGIGDPSPPSKPVFAKDPIAKPSPPVNPEAIDTTCNSVDLTWQPPRHDGGSKILGYIVEYQKVGDEEWRRANHTPESCPETKYKVTGLRDGQTYKFRVLAVNAAGESDPAHVPEPVLVKDRLEPPELILDANMAREQHIKVGDTLRLSAIIKGVPFPKVTWKKEDRDAPTKARIDVTPVGSKLEIRNAAHEDGGIYSLTVENPAGSKTVSVKVLVLDKPGPPRDLEVSEIRKDSCYLTWKEPLDDGGSVITNYVVERRDVASAQWSPLSATSKKKSHFAKHLNEGNQYLFRVAAENQYGRGPFVETPKPIKALDPLHPPGPPKDLHHVDVDKTEVSLVWNKPDRDGGSPITGYLVEYQEEGTQDWIKFKTVTNLECVVTGLQQGKTYRFRVKAENIVGLGLPDTTIPIECQEKLVPPSVELDVKLIEGLVVKAGTTVRFPAIIRGVPVPTAKWTTDGSEIKTDEHYTVETDNFSSVLTIKNCLRRDTGEYQITVSNAAGSKTVAVHLTVLDVPGPPTGPINILDVTPEHMTISWQPPKDDGGSPVINYIVEKQDTRKDTWGVVSSGSSKTKLKIPHLQKGCEYVFRVRAENKIGVGPPLDSTPTVAKHKFSPPSPPGKPVVTDITENAATVSWTLPKSDGGSPITGYYMERREVTGKWVRVNKTPIADLKFRVTGLYEGNTYEFRVFAENLAGLSKPSPSSDPIKACRPIKPPGPPINPKLKDKSRETADLVWTKPLSDGGSPILGYVVECQKPGTAQWNRINKDELIRQCAFRVPGLIEGNEYRFRIKAANIVGEGEPRELAESVIAKDILHPPEVELDVTCRDVITVRVGQTIRILARVKGRPEPDITWTKEGKVLVREKRVDLIQDLPRVELQIKEAVRADHGKYIISAKNSSGHAQGSAIVNVLDRPGPCQNLKVTNVTKENCTISWENPLDNGGSEITNFIVEYRKPNQKGWSIVASDVTKRLIKANLLANNEYYFRVCAENKVGVGPTIETKTPILAINPIDRPGEPENLHIADKGKTFVYLKWRRPDYDGGSPNLSYHVERRLKGSDDWERVHKGSIKETHYMVDRCVENQIYEFRVQTKNEGGESDWVKTEEVVVKEDLQKPVLDLKLSGVLTVKAGDTIRLEAGVRGKPFPEVAWTKDKDATDLTRSPRVKIDTRADSSKFSLTKAKRSDGGKYVVTATNTAGSFVAYATVNVLDKPGPVRNLKIVDVSSDRCTVCWDPPEDDGGCEIQNYILEKCETKRMVWSTYSATVLTPGTTVTRLIEGNEYIFRVRAENKIGTGPPTESKPVIAKTKYDKPGRPDPPEVTKVSKEEMTVVWNPPEYDGGKSITGYFLEKKEKHSTRWVPVNKSAIPERRMKVQNLLPDHEYQFRVKAENEIGIGEPSLPSRPVVAKDPIEPPGPPTNFRVVDTTKHSITLGWGKPVYDGGAPIIGYVVEMRPKIADASPDEGWKRCNAAAQLVRKEFTVTSLDENQEYEFRVCAQNQVGIGRPAELKEAIKPKEILEPPEIDLDASMRKLVIVRAGCPIRLFAIVRGRPAPKVTWRKVGIDNVVRKGQVDLVDTMAFLVIPNSTRDDSGKYSLTLVNPAGEKAVFVNVRVLDTPGPVSDLKVSDVTKTSCHVSWAPPENDGGSQVTHYIVEKREADRKTWSTVTPEVKKTSFHVTNLVPGNEYYFRVTAVNEYGPGVPTDVPKPVLASDPLSEPDPPRKLEVTEMTKNSATLAWLPPLRDGGAKIDGYITSYREEEQPADRWTEYSVVKDLSLVVTGLKEGKKYKFRVAARNAVGVSLPREAEGVYEAKEQLLPPKILMPEQITIKAGKKLRIEAHVYGKPHPTCKWKKGEDEVVTSSHLAVHKADSSSILIIKDVTRKDSGYYSLTAENSSGTDTQKIKVVVMDAPGPPQPPFDISDIDADACSLSWHIPLEDGGSNITNYIVEKCDVSRGDWVTALASVTKTSCRVGKLIPGQEYIFRVRAENRFGISEPLTSPKMVAQFPFGVPSEPKNARVTKVNKDCIFVAWDRPDSDGGSPIIGYLIERKERNSLLWVKANDTLVRSTEYPCAGLVEGLEYSFRIYALNKAGSSPPSKPTEYVTARMPVDPPGKPEVIDVTKSTVSLIWARPKHDGGSKIIGYFVEACKLPGDKWVRCNTAPHQIPQEEYTATGLEEKAQYQFRAIARTAVNISPPSEPSDPVTILAENVPPRIDLSVAMKSLLTVKAGTNVCLDATVFGKPMPTVSWKKDGTLLKPAEGIKMAMQRNLCTLELFSVNRKDSGDYTITAENSSGSKSATIKLKVLDKPGPPASVKINKMYSDRAMLSWEPPLEDGGSEITNYIVDKRETSRPNWAQVSATVPITSCSVEKLIEGHEYQFRICAENKYGVGDPVFTEPAIAKNPYDPPGRCDPPVISNITKDHMTVSWKPPADDGGSPITGYLLEKRETQAVNWTKVNRKPIIERTLKATGLQEGTEYEFRVTAINKAGPGKPSDASKAAYARDPQYPPGPPAFPKVYDTTRSSVSLSWGKPAYDGGSPIIGYLVEVKRADSDNWVRCNLPQNLQKTRFEVTGLMEDTQYQFRVYAVNKIGYSDPSDVPDKHYPKDILIPPEGELDADLRKTLILRAGVTMRLYVPVKGRPPPKITWSKPNVNLRDRIGLDIKSTDFDTFLRCENVNKYDAGKYILTLENSCGKKEYTIVVKVLDTPGPPVNVTVKEISKDSAYVTWEPPIIDGGSPIINYVVQKRDAERKSWSTVTTECSKTSFRVANLEEGKSYFFRVFAENEYGIGDPGETRDAVKASQTPGPVVDLKVRSVSKSSCSIGWKKPHSDGGSRIIGYVVDFLTEENKWQRVMKSLSLQYSAKDLTEGKEYTFRVSAENENGEGTPSEITVVARDDVVAPDLDLKGLPDLCYLAKENSNFRLKIPIKGKPAPSVSWKKGEDPLATDTRVSVESSAVNTTLIVYDCQKSDAGKYTITLKNVAGTKEGTISIKVVGKPGIPTGPIKFDEVTAEAMTLKWAPPKDDGGSEITNYILEKRDSVNNKWVTCASAVQKTTFRVTRLHEGMEYTFRVSAENKYGVGEGLKSEPIVARHPFDVPDAPPPPNIVDVRHDSVSLTWTDPKKTGGSPITGYHLEFKERNSLLWKRANKTPIRMRDFKVTGLTEGLEYEFRVMAINLAGVGKPSLPSEPVVALDPIDPPGKPEVINITRNSVTLIWTEPKYDGGHKLTGYIVEKRDLPSKSWMKANHVNVPECAFTVTDLVEGGKYEFRIRAKNTAGAISAPSESTETIICKDEYEAPTIVLDPTIKDGLTIKAGDTIVLNAISILGKPLPKSSWSKAGKDIRPSDITQITSTPTSSMLTIKYATRKDAGEYTITATNPFGTKVEHVKVTVLDVPGPPGPVEISNVSAEKATLTWTPPLEDGGSPIKSYILEKRETSRLLWTVVSEDIQSCRHVATKLIQGNEYIFRVSAVNHYGKGEPVQSEPVKMVDRFGPPGPPEKPEVSNVTKNTATVSWKRPVDDGGSEITGYHVERREKKSLRWVRAIKTPVSDLRCKVTGLQEGSTYEFRVSAENRAGIGPPSEASDSVLMKDAAYPPGPPSNPHVTDTTKKSASLAWGKPHYDGGLEITGYVVEHQKVGDEAWIKDTTGTALRITQFVVPDLQTKEKYNFRISAINDAGVGEPAVIPDVEIVEREMAPDFELDAELRRTLVVRAGLSIRIFVPIKGRPAPEVTWTKDNINLKNRANIENTESFTLLIIPECNRYDTGKFVMTIENPAGKKSGFVNVRVLDTPGPVLNLRPTDITKDSVTLHWDLPLIDGGSRITNYIVEKREATRKSYSTATTKCHKCTYKVTGLSEGCEYFFRVMAENEYGIGEPTETTEPVKASEAPSPPDSLNIMDITKSTVSLAWPKPKHDGGSKITGYVIEAQRKGSDQWTHITTVKGLECVVRNLTEGEEYTFQVMAVNSAGRSAPRESRPVIVKEQTMLPELDLRGIYQKLVIAKAGDNIKVEIPVLGRPKPTVTWKKGDQILKQTQRVNFETTATSTILNINECVRSDSGPYPLTARNIVGEVGDVITIQVHDIPGPPTGPIKFDEVSSDFVTFSWDPPENDGGVPISNYVVEMRQTDSTTWVELATTVIRTTYKATRLTTGLEYQFRVKAQNRYGVGPGITSACIVANYPFKVPGPPGTPQVTAVTKDSMTISWHEPLSDGGSPILGYHVERKERNGILWQTVSKALVPGNIFKSSGLTDGIAYEFRVIAENMAGKSKPSKPSEPMLALDPIDPPGKPVPLNITRHTVTLKWAKPEYTGGFKITSYIVEKRDLPNGRWLKANFSNILENEFTVSGLTEDAAYEFRVIAKNAAGAISPPSEPSDAITCRDDVEAPKIKVDVKFKDTVILKAGEAFRLEADVSGRPPPTMEWSKDGKELEGTAKLEIKIADFSTNLVNKDSTRRDSGAYTLTATNPGGFAKHIFNVKVLDRPGPPEGPLAVTEVTSEKCVLSWFPPLDDGGAKIDHYIVQKRETSRLAWTNVASEVQVTKLKVTKLLKGNEYIFRVMAVNKYGVGEPLESEPVLAVNPYGPPDPPKNPEVTTITKDSMVVCWGHPDSDGGSEIINYIVERRDKAGQRWIKCNKKTLTDLRYKVSGLTEGHEYEFRIMAENAAGISAPSPTSPFYKACDTVFKPGPPGNPRVLDTSRSSISIAWNKPIYDGGSEITGYMVEIALPEEDEWQIVTPPAGLKATSYTITGLTENQEYKIRIYAMNSEGLGEPALVPGTPKAEDRMLPPEIELDADLRKVVTIRACCTLRLFVPIKGRPAPEVKWARDHGESLDKASIESTSSYTLLIVGNVNRFDSGKYILTVENSSGSKSAFVNVRVLDTPGPPQDLKVKEVTKTSVTLTWDPPLLDGGSKIKNYIVEKRESTRKAYSTVATNCHKTSWKVDQLQEGCSYYFRVLAENEYGIGLPAETAESVKASERPLPPGKITLMDVTRNSVSLSWEKPEHDGGSRILGYIVEMQTKGSDKWATCATVKVTEATITGLIQGEEYSFRVSAQNEKGISDPRQLSVPVIAKDLVIPPAFKLLFNTFTVLAGEDLKVDVPFIGRPTPAVTWHKDNVPLKQTTRVNAESTENNSLLTIKDACREDVGHYVVKLTNSAGEAIETLNVIVLDKPGPPTGPVKMDEVTADSITLSWGPPKYDGGSSINNYIVEKRDTSTTTWQIVSATVARTTIKACRLKTGCEYQFRIAAENRYGKSTYLNSEPTVAQYPFKVPGPPGTPVVTLSSRDSMEVQWNEPISDGGSRVIGYHLERKERNSILWVKLNKTPIPQTKFKTTGLEEGVEYEFRVSAENIVGIGKPSKVSECYVARDPCDPPGRPEAIIVTRNSVTLQWKKPTYDGGSKITGYIVEKKELPEGRWMKASFTNIIDTHFEVTGLVEDHRYEFRVIARNAAGVFSEPSESTGAITARDEVDPPRISMDPKYKDTIVVHAGESFKVDADIYGKPIPTIQWIKGDQELSNTARLEIKSTDFATSLSVKDAVRVDSGNYILKAKNVAGERSVTVNVKVLDRPGPPEGPVVISGVTAEKCTLAWKPPLQDGGSDIINYIVERRETSRLVWTVVDANVQTLSCKVTKLLEGNEYTFRIMAVNKYGVGEPLESEPVVAKNPFVVPDAPKAPEVTTVTKDSMIVVWERPASDGGSEILGYVLEKRDKEGIRWTRCHKRLIGELRLRVTGLIENHDYEFRVSAENAAGLSEPSPPSAYQKACDPIYKPGPPNNPKVIDITRSSVFLSWSKPIYDGGCEIQGYIVEKCDVSVGEWTMCTPPTGINKTNIEVEKLLEKHEYNFRICAINKAGVGEHADVPGPIIVEEKLEAPDIDLDLELRKIINIRAGGSLRLFVPIKGRPTPEVKWGKVDGEIRDAAIIDVTSSFTSLVLDNVNRYDSGKYTLTLENSSGTKSAFVTVRVLDTPSPPVNLKVTEITKDSVSITWEPPLLDGGSKIKNYIVEKREATRKSYAAVVTNCHKNSWKIDQLQEGCSYYFRVTAENEYGIGLPAQTADPIKVAEVPQPPGKITVDDVTRNSVSLSWTKPEHDGGSKIIQYIVEMQAKHSEKWSECARVKSLQAVITNLTQGEEYLFRVVAVNEKGRSDPRSLAVPIVAKDLVIEPDVKPAFSSYSVQVGQDLKIEVPISGRPKPTITWTKDGLPLKQTTRINVTDSLDLTTLSIKETHKDDGGQYGITVANVVGQKTASIEIVTLDKPDPPKGPVKFDDVSAESITLSWNPPLYTGGCQITNYIVQKRDTTTTVWDVVSATVARTTLKVTKLKTGTEYQFRIFAENRYGQSFALESDPIVAQYPYKEPGPPGTPFATAISKDSMVIQWHEPVNNGGSPVIGYHLERKERNSILWTKVNKTIIHDTQFKAQNLEEGIEYEFRVYAENIVGVGKASKNSECYVARDPCDPPGTPEPIMVKRNEITLQWTKPVYDGGSMITGYIVEKRDLPDGRWMKASFTNVIETQFTVSGLTEDQRYEFRVIAKNAAGAISKPSDSTGPITAKDEVELPRISMDPKFRDTIVVNAGETFRLEADVHGKPLPTIEWLRGDKEIEESARCEIKNTDFKALLIVKDAIRIDGGQYILRASNVAGSKSFPVNVKVLDRPGPPEGPVQVTGVTSEKCSLTWSPPLQDGGSDISHYVVEKRETSRLAWTVVASEVVTNSLKVTKLLEGNEYVFRIMAVNKYGVGEPLESAPVLMKNPFVLPGPPKSLEVTNIAKDSMTVCWNRPDSDGGSEIIGYIVEKRDRSGIRWIKCNKRRITDLRLRVTGLTEDHEYEFRVSAENAAGVGEPSPATVYYKACDPVFKPGPPTNAHIVDTTKNSITLAWGKPIYDGGSEILGYVVEICKADEEEWQIVTPQTGLRVTRFEISKLTEHQEYKIRVCALNKVGLGEATSVPGTVKPEDKLEAPELDLDSELRKGIVVRAGGSARIHIPFKGRPTPEITWSREEGEFTDKVQIEKGVNYTQLSIDNCDRNDAGKYILKLENSSGSKSAFVTVKVLDTPGPPQNLAVKEVRKDSAFLVWEPPIIDGGAKVKNYVIDKRESTRKAYANVSSKCSKTSFKVENLTEGAIYYFRVMAENEFGVGVPVETVDAVKAAEPPSPPGKVTLTDVSQTSASLMWEKPEHDGGSRVLGYVVEMQPKGTEKWSIVAESKVCNAVVTGLSSGQEYQFRVKAYNEKGKSDPRVLGVPVIAKDLTIQPSLKLPFNTYSIQAGEDLKIEIPVIGRPRPNISWVKDGEPLKQTTRVNVEETATSTVLHIKEGNKDDFGKYTVTATNSAGTATENLSVIVLEKPGPPVGPVRFDEVSADFVVISWEPPAYTGGCQISNYIVEKRDTTTTTWHMVSATVARTTIKITKLKTGTEYQFRIFAENRYGKSAPLDSKAVIVQYPFKEPGPPGTPFVTSISKDQMLVQWHEPVNDGGTKIIGYHLEQKEKNSILWVKLNKTPIQDTKFKTTGLDEGLEYEFKVSAENIVGIGKPSKVSECFVARDPCDPPGRPEAIVITRNNVTLKWKKPAYDGGSKITGYIVEKKDLPDGRWMKASFTNVLETEFTVSGLVEDQRYEFRVIARNAAGNFSEPSDSSGAITARDEIDAPNASLDPKYKDVIVVHAGETFVLEADIRGKPIPDVVWSKDGKELEETAARMEIKSTIQKTTLVVKDCIRTDGGQYILKLSNVGGTKSIPITVKVLDRPGPPEGPLKVTGVTAEKCYLAWNPPLQDGGANISHYIIEKRETSRLSWTQVSTEVQALNYKVTKLLPGNEYIFRVMAVNKYGIGEPLESGPVTACNPYKPPGPPSTPEVSAITKDSMVVTWARPVDDGGTEIEGYILEKRDKEGVRWTKCNKKTLTDLRLRVTGLTEGHSYEFRVAAENAAGVGEPSEPSVFYRACDALYPPGPPSNPKVTDTSRSSVSLAWSKPIYDGGAPVKGYVVEVKEAAADEWTTCTPPTGLQGKQFTVTKLKENTEYNFRICAINSEGVGEPATLPGSVVAQERIEPPEIELDADLRKVVVLRASATLRLFVTIKGRPEPEVKWEKAEGILTDRAQIEVTSSFTMLVIDNVTRFDSGRYNLTLENNSGSKTAFVNVRVLDSPSAPVNLTIREVKKDSVTLSWEPPLIDGGAKITNYIVEKRETTRKAYATITNNCTKTTFRIENLQEGCSYYFRVLASNEYGIGLPAETTEPVKVSEPPLPPGRVTLVDVTRNTATIKWEKPESDGGSKITGYVVEMQTKGSEKWSTCTQVKTLEATISGLTAGEEYVFRVAAVNEKGRSDPRQLGVPVIARDIEIKPSVELPFHTFNVKAREQLKIDVPFKGRPQATVNWRKDGQTLKETTRVNVSSSKTVTSLSIKEASKEDVGTYELCVSNSAGSITVPITIIVLDRPGPPGPIRIDEVSCDSITISWNPPEYDGGCQISNYIVEKKETTSTTWHIVSQAVARTSIKIVRLTTGSEYQFRVCAENRYGKSSYSESSAVVAEYPFSPPGPPGTPKVVHATKSTMLVTWQVPVNDGGSRVIGYHLEYKERSSILWSKANKILIADTQMKVSGLDEGLMYEYRVYAENIAGIGKCSKSCEPVPARDPCDPPGQPEVTNITRKSVSLKWSKPHYDGGAKITGYIVERRELPDGRWLKCNYTNIQETYFEVTELTEDQRYEFRVFARNAADSVSEPSESTGPIIVKDDVEPPRVMMDVKFRDVIVVKAGEVLKINADIAGRPLPVISWAKDGIEIEERARTEIISTDNHTLLTVKDCIRRDTGQYVLTLKNVAGTRSVAVNCKVLDKPGPPAGPLEINGLTAEKCSLSWGRPQEDGGADIDYYIVEKRETSHLAWTICEGELQMTSCKVTKLLKGNEYIFRVTGVNKYGVGEPLESVAIKALDPFTVPSPPTSLEITSVTKESMTLCWSRPESDGGSEISGYIIERREKNSLRWVRVNKKPVYDLRVKSTGLREGCEYEYRVYAENAAGLSLPSETSPLIRAEDPVFLPSPPSKPKIVDSGKTTITIAWVKPLFDGGAPITGYTVEYKKSDDTDWKTSIQSLRGTEYTISGLTTGAEYVFRVKSVNKVGASDPSDSSDPQIAKEREEEPLFDIDSEMRKTLIVKAGASFTMTVPFRGRPVPNVLWSKPDTDLRTRAYVDTTDSRTSLTIENANRNDSGKYTLTIQNVLSAASLTLVVKVLDTPGPPTNITVQDVTKESAVLSWDVPENDGGAPVKNYHIEKREASKKAWVSVTNNCNRLSYKVTNLQEGAIYYFRVSGENEFGVGIPAETKEGVKITEKPSPPEKLGVTSISKDSVSLTWLKPEHDGGSRIVHYVVEALEKGQKNWVKCAVAKSTHHVVSGLRENSEYFFRVFAENQAGLSDPRELLLPVLIKEQLEPPEIDMKNFPSHTVYVRAGSNLKVDIPISGKPLPKVTLSRDGVPLKATMRFNTEITAENLTINLKESVTADAGRYEITAANSSGTTKAFINIVVLDRPGPPTGPVVISDITEESVTLKWEPPKYDGGSQVTNYILLKRETSTAVWTEVSATVARTMMKVMKLTTGEEYQFRIKAENRFGISDHIDSACVTVKLPYTTPGPPSTPWVTNVTRESITVGWHEPVSNGGSAVVGYHLEMKDRNSILWQKANKLVIRTTHFKVTTISAGLIYEFRVYAENAAGVGKPSHPSEPVLAIDACEPPRNVRITDISKNSVSLSWQQPAFDGGSKITGYIVERRDLPDGRWTKASFTNVTETQFIISGLTQNSQYEFRVFARNAVGSISNPSEVVGPITCIDSYGGPVIDLPLEYTEVVKYRAGTSVKLRAGISGKPAPTIEWYKDDKELQTNALVCVENTTDLASILIKDADRLNSGCYELKLRNAMGSASATIRVQILDKPGPPGGPIEFKTVTAEKITLLWRPPADDGGAKITHYIVEKRETSRVVWSMVSEHLEECIITTTKIIKGNEYIFRVRAVNKYGIGEPLESDSVVAKNAFVTPGPPGIPEVTKITKNSMTVVWSRPIADGGSDISGYFLEKRDKKSLGWFKVLKETIRDTRQKVTGLTENSDYQYRVCAVNAAGQGPFSEPSEFYKAADPIDPPGPPAKIRIADSTKSSITLGWSKPVYDGGSAVTGYVVEIRQGEEEEWTTVSTKGEVRTTEYVVSNLKPGVNYYFRVSAVNCAGQGEPIEMNEPVQAKDILEAPEIDLDVALRTSVIAKAGEDVQVLIPFKGRPPPTVTWRKDEKNLGSDARYSIENTDSSSLLTIPQVTRNDTGKYILTIENGVGEPKSSTVSVKVLDTPAACQKLQVKHVSRGTVTLLWDPPLIDGGSPIINYVIEKRDATKRTWSVVSHKCSSTSFKLIDLSEKTPFFFRVLAENEIGIGEPCETTEPVKAAEVPAPIRDLSMKDSTKTSVILSWTKPDFDGGSVITEYVVERKGKGEQTWSHAGISKTCEIEVSQLKEQSVLEFRVFAKNEKGLSDPVTIGPITVKELIITPEVDLSDIPGAQVTVRIGHNVHLELPYKGKPKPSISWLKDGLPLKESEFVRFSKTENKITLSIKNAKKEHGGKYTVILDNAVCRIAVPITVITLGPPSKPKGPIRFDEIKADSVILSWDVPEDNGGGEITCYSIEKRETSQTNWKMVCSSVARTTFKVPNLVKDAEYQFRVRAENRYGVSQPLVSSIIVAKHQFRIPGPPGKPVIYNVTSDGMSLTWDAPVYDGGSEVTGFHVEKKERNSILWQKVNTSPISGREYRATGLVEGLDYQFRVYAENSAGLSSPSDPSKFTLAVSPVDPPGTPDYIDVTRETITLKWNPPLRDGGSKIVGYSIEKRQGNERWVRCNFTDVSECQYTVTGLSPGDRYEFRIIARNAVGTISPPSQSSGIIMTRDENVPPIVEFGPEYFDGLIIKSGESLRIKALVQGRPVPRVTWFKDGVEIEKRMNMEITDVLGSTSLFVRDATRDHRGVYTVEAKNASGSAKAEIKVKVQDTPGKVVGPIRFTNITGEKMTLWWDAPLNDGCAPITHYIIEKRETSRLAWALIEDKCEAQSYTAIKLINGNEYQFRVSAVNKFGVGRPLDSDPVVAQIQYTVPDAPGIPEPSNITGNSITLTWARPESDGGSEIQQYILERREKKSTRWVKVISKRPISETRFKVTGLTEGNEYEFHVMAENAAGVGPASGISRLIKCREPVNPPGPPTVVKVTDTSKTTVSLEWSKPVFDGGMEIIGYIIEMCKADLGDWHKVNAEACVKTRYTVTDLQAGEEYKFRVSAINGAGKGDSCEVTGTIKAVDRLTAPELDIDANFKQTHVVRAGASIRLFIAYQGRPTPTAVWSKPDSNLSLRADIHTTDSFSTLTVENCNRNDAGKYTLTVENNSGSKSITFTVKVLDTPGPPGPITFKDVTRGSATLMWDAPLLDGGARIHHYVVEKREASRRSWQVISEKCTRQIFKVNDLAEGVPYYFRVSAVNEYGVGEPYEMPEPIVATEQPAPPRRLDVVDTSKSSAVLAWLKPDHDGGSRITGYLLEMRQKGSDFWVEAGHTKQLTFTVERLVEKTEYEFRVKAKNDAGYSEPREAFSSVIIKEPQIEPTADLTGITNQLITCKAGSPFTIDVPISGRPAPKVTWKLEEMRLKETDRVSITTTKDRTTLTVKDSMRGDSGRYFLTLENTAGVKTFSVTVVVIGRPGPVTGPIEVSSVSAESCVLSWGEPKDGGGTEITNYIVEKRESGTTAWQLVNSSVKRTQIKVTHLTKYMEYSFRVSSENRFGVSKPLESAPIIAEHPFVPPSAPTRPEVYHVSANAMSIRWEEPYHDGGSKIIGYWVEKKERNTILWVKENKVPCLECNYKVTGLVEGLEYQFRTYALNAAGVSKASEASRPIMAQNPVDAPGRPEVTDVTRSTVSLIWSAPAYDGGSKVVGYIIERKPVSEVGDGRWLKCNYTIVSDNFFTVTALSEGDTYEFRVLAKNAAGVISKGSESTGPVTCRDEYAPPKAELDARLHGDLVTIRAGSDLVLDAAVGGKPEPKIIWTKGDKELDLCEKVSLQYTGKRATAVIKFCDRSDSGKYTLTVKNASGTKAVSVMVKVLDSPGPCGKLTVSRVTQEKCTLAWSLPQEDGGAEITHYIVERRETSRLNWVIVEGECPTLSYVVTRLIKNNEYIFRVRAVNKYGPGVPVESEPIVARNSFTIPSPPGIPEEVGTGKEHIIIQWTKPESDGGNEISNYLVDKREKKSLRWTRVNKDYVVYDTRLKVTSLMEGCDYQFRVTAVNAAGNSEPSEASNFISCREPSYTPGPPSAPRVVDTTKHSISLAWTKPMYDGGTDIVGYVLEMQEKDTDQWYRVHTNATIRNTEFTVPDLKMGQKYSFRVAAVNVKGMSEYSESIAEIEPVERIEIPDLELADDLKKTVTIRAGASLRLMVSVSGRPPPVITWSKQGIDLASRAIIDTTESYSLLIVDKVNRYDAGKYTIEAENQSGKKSATVLVKVYDTPGPCPSVKVKEVSRDSVTITWEIPTIDGGAPVNNYIVEKREAAMRAFKTVTTKCSKTLYRISGLVEGTMYYFRVLPENIYGIGEPCETSDAVLVSEVPLVPAKLEVVDVTKSTVTLAWEKPLYDGGSRLTGYVLEACKAGTERWMKVVTLKPTVLEHTVTSLNEGEQYLFRIRAQNEKGVSEPRETVTAVTVQDLRVLPTIDLSTMPQKTIHVPAGRPVELVIPIAGRPPPAASWFFAGSKLRESERVTVETHTKVAKLTIRETTIRDTGEYTLELKNVTGTTSETIKVIILDKPGPPTGPIKIDEIDATSITISWEPPELDGGAPLSGYVVEQRDAHRPGWLPVSESVTRSTFKFTRLTEGNEYVFRVAATNRFGIGSYLQSEVIECRSSIRIPGPPETLQIFDVSRDGMTLTWYPPEDDGGSQVTGYIVERKEVRADRWVRVNKVPVTMTRYRSTGLTEGLEYEHRVTAINARGSGKPSRPSKPIVAMDPIAPPGKPQNPRVTDTTRTSVSLAWSVPEDEGGSKVTGYLIEMQKVDQHEWTKCNTTPTKIREYTLTHLPQGAEYRFRVLACNAGGPGEPAEVPGTVKVTEMLEYPDYELDERYQEGIFVRQGGVIRLTIPIKGKPFPICKWTKEGQDISKRAMIATSETHTELVIKEADRGDSGTYDLVLENKCGKKAVYIKVRVIGSPNSPEGPLEYDDIQVRSVRVSWRPPADDGGADILGYILERREVPKAAWYTIDSRVRGTSLVVKGLKENVEYHFRVSAENQFGISKPLKSEEPVTPKTPLNPPEPPSNPPEVLDVTKSSVSLSWSRPKDDGGSRVTGYYIERKETSTDKWVRHNKTQITTTMYTVTGLVPDAEYQFRIIAQNDVGLSETSPASEPVVCKDPFDKPSQPGELEILSISKDSVTLQWEKPECDGGKEILGYWVEYRQSGDSAWKKSNKERIKDKQFTIGGLLEATEYEFRVFAENETGLSRPRRTAMSIKTKLTSGEAPGIRKEMKDVTTKLGEAAQLSCQIVGRPLPDIKWYRFGKELIQSRKYKMSSDGRTHTLTVMTEEQEDEGVYTCIATNEVGEVETSSKLLLQATPQFHPGYPLKEKYYGAVGSTLRLHVMYIGRPVPAMTWFHGQKLLQNSENITIENTEHYTHLVMKNVQRKTHAGKYKVQLSNVFGTVDAILDVEIQDKPDKPTGPIVIEALLKNSAVISWKPPADDGGSWITNYVVEKCEAKEGAEWQLVSSAISVTTCRIVNLTENAGYYFRVSAQNTFGISDPLEVSSVVIIKSPFEKPGAPGKPTITAVTKDSCVVAWKPPASDGGAKIRNYYLEKREKKQNKWISVTTEEIRETVFSVKNLIEGLEYEFRVKCENLGGESEWSEISEPITPKSDVPIQAPHFKEELRNLNVRYQSNATLVCKVTGHPKPIVKWYRQGKEIIADGLKYRIQEFKGGYHQLIIASVTDDDATVYQVRATNQGGSVSGTASLEVEVPAKIHLPKTLEGMGAVHALRGEVVSIKIPFSGKPDPVITWQKGQDLIDNNGHYQVIVTRSFTSLVFPNGVERKDAGFYVVCAKNRFGIDQKTVELDVADVPDPPRGVKVSDVSRDSVNLTWTEPASDGGSKITNYIVEKCATTAERWLRVGQARETRYTVINLFGKTSYQFRVIAENKFGLSKPSEPSEPTITKEDKTRAMNYDEEVDETREVSMTKASHSSTKELYEKYMIAEDLGRGEFGIVHRCVETSSKKTYMAKFVKVKGTDQVLVKKEISILNIARHRNILHLHESFESMEELVMIFEFISGLDIFERINTSAFELNEREIVSYVHQVCEALQFLHSHNIGHFDIRPENIIYQTRRSSTIKIIEFGQARQLKPGDNFRLLFTAPEYYAPEVHQHDVVSTATDMWSLGTLVYVLLSGINPFLAETNQQIIENIMNAEYTFDEEAFKEISIEAMDFVDRLLVKERKSRMTASEALQHPWLKQKIERVSTKVIRTLKHRRYYHTLIKKDLNMVVSAARISCGGAIRSQKGVSVAKVKVASIEIGPVSGQIMHAVGEEGGHVKYVCKIENYDQSTQVTWYFGVRQLENSEKYEITYEDGVAILYVKDITKLDDGTYRCKVVNDYGEDSSYAELFVKGVREVYDYYCRRTMKKIKRRTDTMRLLERPPEFTLPLYNKTAYVGENVRFGVTITVHPEPHVTWYKSGQKIKPGDNDKKYTFESDKGLYQLTINSVTTDDDAEYTVVARNKYGEDSCKAKLTVTLHPPPTDSTLRPMFKRLLANAECQEGQSVCFEIRVSGIPPPTLKWEKDGQPLSLGPNIEIIHEGLDYYALHIRDTLPEDTGYYRVTATNTAGSTSCQAHLQVERLRYKKQEFKSKEEHERHVQKQIDKTLRMAEILSGTESVPLTQVAKEALREAAVLYKPAVSTKTVKGEFRLEIEEKKEERKLRMPYDVPEPRKYKQTTIEEDQRIKQFVPMSDMKWYKKIRDQYEMPGKLDRVVQKRPKRIRLSRWEQFYVMPLPRITDQYRPKWRIPKLSQDDLEIVRPARRRTPSPDYDFYYRPRRRSLGDISDEELLLPIDDYLAMKRTEEERLRLEEELELGFSASPPSRSPPHFELSSLRYSSPQAHVKVEETRKDFRYSTYHIPTKAEASTSYAELRERHAQAAYRQPKQRQRIMAEREDEELLRPVTTTQHLSEYKSELDFMSKEEKSRKKSRRQREVTEITEIEEEYEISKHAQRESSSSASRLLRRRRSLSPTYIELMRPVSELIRSRPQPAEEYEDDTERRSPTPERTRPRSPSPVSSERSLSRFERSARFDIFSRYESMKAALKTQKTSERKYEVLSQQPFTLDHAPRITLRMRSHRVPCGQNTRFILNVQSKPTAEVKWYHNGVELQESSKIHYTNTSGVLTLEILDCHTDDSGTYRAVCTNYKGEASDYATLDVTGGDYTTYASQRRDEEVPRSVFPELTRTEAYAVSSFKKTSEMEASSSVREVKSQMTETRESLSSYEHSASAEMKSAALEEKSLEEKSTTRKIKTTLAARILTKPRSMTVYEGESARFSCDTDGEPVPTVTWLRKGQVLSTSARHQVTTTKYKSTFEISSVQASDEGNYSVVVENSEGKQEAEFTLTIQKARVTEKAVTSPPRVKSPEPRVKSPEAVKSPKRVKSPEPSHPKAVSPTETKPTPTEKVQHLPVSAPPKITQFLKAEASKEIAKLTCVVESSVLRAKEVTWYKDGKKLKENGHFQFHYSADGTYELKINNLTESDQGEYVCEISGEGGTSKTNLQFMGQAFKSIHEKVSKISETKKSDQKTTESTVTRKTEPKAPEPISSKPVIVTGLQDTTVSSDSVAKFAVKATGEPRPTAIWTKDGKAITQGGKYKLSEDKGGFFLEIHKTDTSDSGLYTCTVKNSAGSVSSSCKLTIKAIKDTEAQKVSTQKTSEITPQKKAVVQEEISQKALRSEEIKMSEAKSQEKLALKEEASKVLISEEVKKSAATSLEKSIVHEEITKTSQASEEVRTHAEIKAFSTQMSINEGQRLVLKANIAGATDVKWVLNGVELTNSEEYRYGVSGSDQTLTIKQASHRDEGILTCISKTKEGIVKCQYDLTLSKELSDAPAFISQPRSQNINEGQNVLFTCEISGEPSPEIEWFKNNLPISISSNVSISRSRNVYSLEIRNASVSDSGKYTIKAKNFRGQCSATASLMVLPLVEEPSREVVLRTSGDTSLQGSFSSQSVQMSASKQEASFSSFSSSSASSMTEMKFASMSAQSMSSMQESFVEMSSSSFMGISNMTQLESSTSKMLKAGIRGIPPKIEALPSDISIDEGKVLTVACAFTGEPTPEVTWSCGGRKIHSQEQGRFHIENTDDLTTLIIMDVQKQDGGLYTLSLGNEFGSDSATVNIHIRSI

SEQ ID NO: 2905 - protein, 415 aa, Homo sapiens
MLRSTSTVTLLSGGAARTPGAPSRRANVCRLRLTVPPESPVPEQCEKKIERKEQLLDLSNGEPTRKLPQGVVYGVVRRSDQNQQKEMVVYGWSTSQLKEEMNYIKDVSHAQQEYLENHIQTQSSALDRFNAMNSALASDSIGLQKTLVDVTLENSNIKDQIRNLQQTYEASMDKLREKQRQLEVAQVENQLLKMKVESSQEANAEVMREMTKKLYSQYEEKLQEEQRKHSAEKEALLEETNSFLKAIEEANKKMQAAEISLEEKDQRIGELDRLIERMEKERHQLQLQLLEHETEMSGELTDSDKERYQQLEEASASLRERIRHLDDMVHCQQKKVKQMVEENNELQSRLDYLTETQAKTEVETREIGVGCDLLPRQSRKFEKVLNEFVQLLPLPHHLLWAFGNVCWRRHFGLLQ

SEQ ID NO: 2906 - protein, 926 aa, Homo sapiens
MAEPGHSHHLSARVRGRTERRIPRLWRLLLWAGTAFQVTQGTGPELHACKESEYHYEYTACDSTGSRWRVAVPHTPGLCTSLPDPIKGTECSFSCNAGEFLDMKDQSCKPCAEGRYSLGTGIRFDEWDELPHGFASLSANMELDDSAAESTGNCTSSKWVPRGDYIASNTDECTATLMYAVNLKQSGTVNFEYYYPDSSIIFEFFVQNDQCQPNADDSRWMKTTEKGWEFHSVELNRGNNVLYWRTTAFSVWTKVPKPVLTQLMYKWAKPKICSEDLEGAVKLPASGVKTHCPPCNPGFFKTNNSTCQPCPYGSYSNGSDCTRCPAGTEPAVGFEYKWWNTLPTNMETTVLSGINFEYKGMTGWEVAGDHIYTAAGASDNDFMILTLVVPGFRPPQSVMADTENKEVARITFVFETLCSVNCELYFMVGVNSRTNTPVETWKGSKGKQSYTYIIEENTTTSFTWAFQRTTFHEASRKYTNDVAKIYSINVTNVMNGVASYCRPCALEASDVGSSCTSCPAGYYIDRDSGTCHSCPTNTILKAHQPYGVQACVPCGPGTKNNKIHSLCYNDCTFSRNTPTRTFNYNFSALANTVTLAGGPSFTSKGLKYFHHFTLSLCGNQGRKMSVCTDNVTDLRIPEGESGFSKSITAYVCQAVIIPPEVTGYKAGVSSQPVSLADRLIGVTTDMTLDGITSPAELFHLESLGIPDVIFFYRSNDVTQSCSSGRSTTIRVRCSPQKTVPGSLLLPGTCSDGTCDGCNFHFLWESAAACPLCSVADYHAIVSSCVAGIQKTTYVWREPKLCSGGISLPEQRVTICKTIDFWLKVGISAGTCTAILLTVLTCYFWKKNQKLEYKYSKLVMNATLKDCDLPAADSCAIMEGEDVEDDLIFTSKKSLFGKIKSFTSKRTPDGFDSVPLKTSSGGLDMDL

SEQ ID NO: 2907 - protein, 303 aa, Homo sapiens
MAWWLIAFAHGDLAPSEGTAEPCVTSIHSFSSAFLFSIEVQVTIGFGGRMVTEECPLAILILIVQNIVGLMINAIMLGCIFMKTAQAHRRAETLIFSKHAVIALRHGRLCFMLRVGDLRKSMIISATIHMQVVRKTTSPEGEVVPLHQVDIPMENGVGGNSIFLVAPLIIYHVIDANSPLYDLAPSDLHHHQDLEIIVILEGVVETTGITTQARTSYLADEILWGQRFVPIVAEEDGRYSVDYSKFGNTVKVPTPLCTARQLDEDHSLLEALTLASARGPLRKRSVPMAKAKPKFSISPDSLS

SEQ ID NO: 2908 - protein, 319 aa, Homo sapiens
MSVCYRPPGNETLLSWKTSRATGTAFLLLAALLGLPGNGFVVWSLAGWRPARGRPLAATLVLHLALADGAVLLLTPLFVAFLTRQAWPLGQAGCKAVYYVCALSMYASVLLTGLLSLQRCLAVTRPFLAPRLRSPALARRLLLAVWLAALLLAVPAAVYRHLWRDRVCQLCHPSPVHAAAHLSLETLTAFVLPFGLMLGCYSVTLARLRGARWGSGRHGARVGRLVSAIVLAFGLLWAPYHAVNLLQAVAALAPPEGALAKLGGAGQAARAGTTALAFFSSSVNPVLYVFTAGDLLPRAGPRFLTRLFEGSGEARGGGR

SEQ ID NO: 2909 - protein, 1037 aa, Homo sapiens
MGCFPTHLMPRPRVAMAEAEAGVAVEVRGLPPAVPDELLTLYFENRRRSGGGPVLSWQRLGCGGVLTFREPADAERVLAQADHELHGAQLSLRPAPPRAPARLLLQGLPPGTTPQRLEQHVQALLRASGLPVQPCCALASPRPDRALVQLPKPLSEADVRVLEEQAQNLGLEGTLVSLARVPQARAVRVVGDGASVDLLLLELYLENERRSGGGPLEDLQRLPGPLGTVASFQQWQVAERVLQQEHRLQGSELSLVPHYDILEPEELAENTSGGDHPSTQGPRATKHALLRTGGLVTALQGAGTVTMGSGEEPGQSGASLRTGPMVQGRGIMTTGSGQEPGQSGTSLRTGPMGSLGQAEQVSSMPMGSLEHEGLVSLRPVGLQEQEGPMSLGPVGSAGPVETSKGLLGQEGLVEIAMDSPEQEGLVGPMEITMGSLEKAGPVSPGCVKLAGQEGLVEMVLLMEPGAMRFLQLYHEDLLAGLGDVALLPLEGPDMTGFRLCGAQASCQAAEEFLRSLLGSISCHVLCLEHPGSARFLLGPEGQHLLQGLEAQFQCVFGTERLATATLDTGLEEVDPTEALPVLPGNAHTLWTPDSTGGDQEDVSLEEVRELLATLEGLDLDGEDWLPRELEEEGPQEQPEEEVTPGHEEEEPVAPSTVAPRWLEEEAALQLALHRSLEPQGQVAEQEEAAALRQALTLSLLEQPPLEAEEPPDGGTDGKAQLVVHSAFEQDVEELDRALRAALEVHVQEETVGPWRRTLPAELRARLERCHGVSVALRGDCTILRGFGAHPARAARHLVALLAGPWDQSLAFPLAASGPTLAGQTLKGPWNNLERLAENTGEFQEVVRAFYDTLDAARSSIRVVRVERVSHPLLQQQYELYRERLLQRCERRPVEQVLYHGTTAPAVPDICAHGFNRSFCGRNATVYGKGVYFARRASLSVQDRYSPPNADGHKAVFVARVLTGDYGQGRRGLRAPPLRGPGHVLLRYDSAVDCICQPSIFVIFHDTQALPTHLITCEHVPRASPDDPSGLPGRSPDT

SEQ ID NO: 2910 - protein, 253 aa, Homo sapiens
MRAAGVGLVDCHCHLSAPDFDRDLDDVLEKAKKANVVALVAVAEHSGEFEKIMQLSERYNGFVLPCLGVHPVQGLPPEDQRSVTLKVGLDFSPRFAGTGEQKEEQRQVLIRQIQLAKRLNLPVNVHSRSAGRPTINLLQEQGAEKVLLHAFDGRPSVAMEGVRAGYFFSIPPSIIRSGQKQKLVKQLPLTSICLETDSPALGPEKQVRNEPWNISISAEYIAQVKGISVEEVIEVTTQNALKLFPKLRHLLQK

SEQ ID NO: 2911 - protein, 918 aa, Homo sapiens
MGRSNSRSHSSRSKSRSQSSSRSRSRSHSRKKRYRSRSRTYSRSRSRDRMYSRDYRRDYRNNRGMRRPYGYRGRGRGYYQGGGGRYHRGGYRPVWNRRHSRSPRRGRSRSRSPKRRSVSSQRSRSRSRRSYRSSRSPRSSSSRSSSPYSKSPVSKRRGSQEKQTKKAEGEPQEESPLKSKSQEEPKDTFEHDPSESIDEFNKSSATSGDIWPGLSAYDNSPRSPHSPSPIATPPSQSSSCSDAPMLSTVHSAKNTPSQHSHSIQHSPERSGSGSVGNGSSRYSPSQNSPIHHIPSRRSPAKTIAPQNAPRDESRGRSSFYPDGGDQETAKTGKFLKRFTDEESRVFLLDRGNTRDKEASKEKGSEKGRAEGEWEDQEALDYFSDKESGKQKFNDSEGDDTEETEDYRQFRKSVLADQGKSFATASHRNTEEEGLKYKSKVSLKGNRESDGFREEKNYKLKETGYVVERPSTTKDKHKEEDKNSERITVKKETQSPEQVKSEKLKDLFDYSPPLHKNLDAREKSTFREESPLRIKMIASDSHRPEVKLKMAPVPLDDSNRPASLTKDRLLASTLVHSVKKEQEFRSIFDHIKLPQASKSTSESFIQHIVSLVHHVKEQYFKSAAMTLNERFTSYQKATEEHSTRQKSPEIHRRIDISPSTLRKHTRLAGEERVFKEENQKGDKKLRCDSADLRHDIDRRRKERSKERGDSKGSRESSGSRKQEKTPKDYKEYKSYKDDSKHKREQDHSRSSSSSASPSSPSSREEKESKKEREEEFKTHHEMKEYSGFAGVSRPRGTFFRIRGRGRARGVFAGTNTGPNNSNTTFQKRPKEEEWDPEYTPKSKKYFLHDDRDDGVDYWAKRGRGRGTFQRGRGRFNFKKSGSSPKWTHDKYQGDGIVEDEEETMENNEEKKDRRKEEKE

SEQ ID NO: 2912 - protein, 63 aa, Homo sapiens
GVTLYELLTHCDSSQSPPTVYHLMKNCWETEASFRPTFENLIPILKTVHEKYQGQAPSVFSVC

SEQ ID NO: 2913 - protein, 414 aa, Homo sapiens
MLRSTSTVTLLSGGAARTPGAPSRRANVCRLRLTVPPESPVPEQCEKKIERKEQLLDLSNGEPTRKLPQGVVYGVVRRSDQNQQKEMVVYGWSTSQLKEEMNYIKDVRATLEKVRKRMYGDYDEMRQKIRQLTQELSVSHAQQEYLENHIQTQSSALDRFNAMNSALASDSIGLQKTLVDVTLENSNIKDQIRNLQQTYEASMDKLREKQRQLEVAQVENQLLKMKVESSQEANAEVMREMTKKLYSQYEEKLQEEQRKHSAEKEALLEETNSFLKAIEEANKKMQAAEISLEEKDQRIGELDRLIERMEKERHQLQLQLLEHETEMSGELTDSDKERYQQLEEASASLRERIRHLDDMVHCQQKKVKQMVEEIESLKKKLQQKQLLILQLLEKISFLEGEGRKGLKGRLKMSC

SEQ ID NO: 2914 - protein, 258 aa, Homo sapiens
MAAKSQPNIPKAKSLDGVTNDRTASQGQWGRACCALTGPVVDIVTGHARLSDIWAKTPPITRKAAQLYTLWVTFQVLLYTSLPDFCHKFLPGYVGGIQEGAVTPAGVVNKYQINGLQAWLLTHLLWFANAHLLSWFSPTIIFDNWIPLLWCANILGYAVSTFAMVKGYFFPTSARDCKFTGNFFYNYMMGIEFNPRIGKWFDFKLFFNGRPGIVAWTLINLSFAAKQRELHSHVTNAMVLVNVLQAIYVIDFFWNETW

SEQ ID NO: 2915 - protein, 155 aa, Homo sapiens
MAEPGHSHHLSARVRGRTERRIPRLWRLLLWAGTAFQVTQGTGPELHACKESEYHYEYTACDSTGSRWRVAVPHTPGLCTSLPDPIKGTECSFSCNAGEFLDMKDQSCKPCAEGRYSLGTGIRFDEWDELPHGFASLSANMELDDSAAESTGNCT

SEQ ID NO: 2916 - protein, 547 aa, Homo sapiens
MTVLEITLAVILTLLGLAILAILLTRWARCKQSEMYISRYSSEQSARLLDYEDGRGSRHAYSTQSERSKRDYTPSTNSLALSRSSIALPQGSMSSIKCLQTTEEPPSRTAGAMMQFTAPIPGATGPIKLSQKTIVQTPGPIVQYPGSNAGPPSAPRGPPMAPIIISQRTASQLAAPIRIPQVHTMDSSGKITLTPVVILTGYMDEELAKKSCSKIQILKCGGTARSQNSREENKEALKNDIIFTNSVESLKSAHIKEPEREGKGTDLEKDKIGMEVKVDSDAGIPKRQETQLKISEMSIPQGQGAQIKKSVSDVPRGQESQVKKSESGVPKGQEAQVTKSGLVVLKGQEAQVEKSEMGVPRRQESQVKKSQSGVSKGQEAQVKKRESVVLKGQEAQVEKSELKVPKGQEGQVEKTEADVPKEQEVQEKKSEAGVLKGPESQVKNTEVSVPETLESQVKKSESGVLKGQEAQEKKESFEDKGNNDKEKERDAEKDPNKKEKGDKNTKGDKGKDKVKGKRESEINGEKSKGSKRAKANTGRKYNKKVEE

SEQ ID NO: 2917 - protein, 119 aa, Homo sapiens
MEERGDSEPTPGCSGLGPGGVRGFGDGGGAPSWAPEDAWMGTHPKYLEMMELDIGDATQVYVAFLVYLDLMESKSWHEVNCVGLPELQLICLVGTEIEGEGLQTVVPTPITASLSHNRW

SEQ ID NO: 2918 - protein, 752 aa, Homo sapiens
MDQREILQKFLDEAQSKKITKEEFANEFLKLKRQSTKYKADKTYPTTVAEKPKNIKKNRYKDILPYDYSRVELSLITSDEDSSYINANFIKGVYGPKAYIATQGPLSTTLLDFWRMIWEYSVLIIVMACMEYEMGKKKCERYWAEPGEMQLEFGPFSVSCEAEKRKSDYIIRTLKVKFNSETRTIYQFHYKNWPDHDVPSSIDPILELIWDVRCYQEDDSVPICIHCSAGCGRTGVICAIDYTWMLLKDGSQAKHCIPEKNHTLQADSYSPNLPKSTTKAAKMMNQQRTKMEIKESSSFDFRTSEISAKEELVLHPAKSSTSFDFLELNYSFDKNADTTMKWQTKAFPIVGEPLQKHQSLDLGSLLFEGCSNSKPVNAAGRYFNSKVPITRTKSTPFELIQQRETKEVDSKENFSYLESQPHDSCFVEMQAQKVMHVSSAELNYSLPYDSKHQIRNASNVKHHDSSALGVYSYIPLVENPYFSSWPPSGTSSKMSLDLPEKQDGTVFPSSLLPTSSTSLFSYYNSHDSLSLNSPTNISSLLNQESAVLATAPRIDDEIPPPLPVWTPESFIVVEEAGEFSPNVPKSLSSAVKVKIGTSLEWGGTSEPKKFDDSVILRPSKSVKLRSPKSELHQDRSSPPPPLPERTLESFFLADEDCMQAQSIETYSTSYPDTMENSTSSKQTLKTPGKSFTRSKSLKILRNMKKSICNSCPPNKPAESVQSNNSSSFLNFGFANRFSKPKGPRNPPPTWNI

SEQ ID NO: 2919 - protein, 920 aa, Homo sapiens
MGRSNSRSHSSRSKSRSQSSSRSRSRSHSRKKRYSSRSRSRTYSRSRSRDRMYSRDYRRDYRNNRGMRRPYGYRGRGRGYYQGGGGRYHRGGYRPVWNRRHSRSPRRGRSRSRSPKRRSVSSQRSRSRSRRSYRSSRSPRSSSSRSSSPYSKSPVSKRRGSQEKQTKKAEGEPQEESPLKSKSQEEPKDTFEHDPSESIDEFNKSSATSGDIWPGLSAYDNSPRSPHSPSPIATPPSQSSSCSDAPMLSTVHSAKNTPSQHSHSIQHSPERSGSGSVGNGSSRYSPSQNSPIHHIPSRRSPAKTIAPQNAPRDESRGRSSFYPDGGDQETAKTGKFLKRFTDEESRVFLLDRGNTRDKEASKEKGSEKGRAEGEWEDQEALDYFSDKESGKQKFNDSEGDDTEETEDYRQFRKSVLADQGKSFATASHRNTEEEGLKYKSKVSLKGNRESDGFREEKNYKLKETGYVVERPSTTKDKHKEEDKNSERITVKKETQSPEQVKSEKLKDLFDYSPPLHKNLDAREKSTFREESPLRIKMIASDSHRPEVKLKMAPVPLDDSNRPASLTKDRLLASTLVHSVKKEQEFRSIFDHIKLPQASKSTSESFIQHIVSLVHHVKEQYFKSAAMTLNERFTSYQKATEEHSTRQKSPEIHRRIDISPSTLRKHTRLAGEERVFKEENQKGDKKLRCDSADLRHDIDRRRKERSKERGDSKGSRESSGSRKQEKTPKDYKEYKSYKDDSKHKREQDHSRSSSSSASPSSPSSREEKESKKEREEEFKTHHEMKEYSGFAGVSRPRGTFFRIRGRGRARGVFAGTNTGPNNSNTTFQKRPKEEEWDPEYTPKSKKYFLHDDRDDGVDYWAKRGRGRGTFQRGRGRFNFKKSGSSPKWTHDKYQGDGIVEDEEETMENNEEKKDRRKEEKE

SEQ ID NO: 2920 - protein, 399 aa, Homo sapiens
MASPGKPGADEAQEEEGELEGGSAGPRAAILEQAEELFLLCDKEAKGFITKHDLQGLQSDLPLTPEQLEAVFESLDRAHTGFLTAREFCLGLGMFVGVASAQGANPCRTPEETFESGGLDVQGTAGSLDEEEEEEERFHTVLEQLGVAPVLGKQRAVRTLWARLQRERPELLGSFEDVLIRASACLEEAARERDGLEQALRRRESEHEREVRALYEETEQLREQSRRPPSQNFARGERRSRLELELQSREQDLERAGLRQRELEQQLHAQAAEHLEAQAQNSQLWRAHEALRTQLEGAQEQIRRLESEARGRQEQTQRDVVAVSRNMQKEKVSLLRQLELLRELNTRLRDDRDACEARRAGSSCRKALTTARLPGPTCCCCCCWARPPRRGSGHLPSAR

SEQ ID NO: 2921 - protein, 2489 aa, Homo sapiens
MPAILVASKMKSGLPKPVHSAAPILHVPPARAGPQPCYLKLGSKVEVSKTTYPSQIPLKSQVLQGLQEPAGEGLPLRKSGSVENGFDTQIYTDWANHYLAKSGHKRLIRDLQQDVTDGVLLAQIIQVVANEKIEDINGCPKNRSQMIENIDACLNFLAAKGINIQGLSAEEIRNGNLKAILGLFFSLSRYKQQQQQPQKQHLSSPLPPAVSQVAGAPSQCQAGTPQQQVPVTPQAPCQPHQPAPHQQSKAQAEMQSSASSKDSSQSKIIRFTLGQKKISRLPGPTARVSAAGSEAKTRGGSTTANNRRSQSFNNYDKSKPVTSPPPPPSSHEKEPLASSASSHPGMSDNAPASLESGSSSTPTNCSTSSAIPQPGAATKPWRSKSLSVKHSATVSMLSVKPPGPEAPRPTPEAMKPAPNNQKSMLEKLKLFNSKGGSKAGEGPGSRDTSCERLETLPSFEESEELEAASRMLTTVGPASSSPKIALKGIAQRTFSRALTNKKSSLKGNEKEKEKQQREKDKEKSKDLAKRASVTERLDLKEEPKEDPSGAAVPEMPKKSSKIASFIPKGGKLNSAKKEPMAPSHSGIPKPGMKSMPGKSPSAPAPSKEGERSRSGKLSSGLPQQKPQLDGRHSSSSSSLASSEGKGPGGTTLNHSISSQTVSGSVGTTQTTGSNTVSVQLPQPQQQYNHPNTATVAPFLYRSQTDTEGNVTAESSSTGVSVEPSHFTKTGQPALEELTGEDPEARRLRTVKNIADLRQNLEETMSSLRGTQVTHSTLETTFDTNVTTEMSGRSILSLTGRPTPLSWRLGQSSPRLQAGDAPSMGNGYPPRANASRFINTESGRYVYSAPLRRQLASRGSSVCHVDVSDKAGDEMDLEGISMDAPGYMSDGDVLSKNIRTDDITSGYMTDGGLGLYTRRLNRLPDGMAVVRETLQRNTSLGLGDADSWDDSSSVSSGISDTIDNLSTDDINTSSSISSYANTPASSRKNLDVQTDAEKHSQVERNSLWSGDDVKKSDGGSDSGIKMEPGSKWRRNPSDVSDESDKSTSGKKNPVISQTGSWRRGMTAQVGITMPRTKPSAPAGALKTPGTGKTDDAKVSEKGRLSPKASQVKRSPSDAGRSSGDESKKPLPSSSRTPTANANSFGFKKQSGSAAGLAMITASGVTVTSRSATLGKIPKSSALVSRSAGRKSSMDGAQNQDDGYLALSSRTNLQYRSLPRPSKSNSRNGAGNRSSTSSIDSNISSKSAGLPVPKLREPSKTALGSSLPGLVNQTDKEKGISSDNESVASCNSVKVNPAAQPVSSPAQTSLQPGAKYPDVASPTLRRLFGGKPTKQVPIATAENMKNSVVISNPHATMTQQGNLDSPSGSGVLSSGSSSPLYSKNVDLNQSPLASSPSSAHSAPSNSLTWGTNASSSSAVSKDGLGFQSVSSLHTSCESIDISLSSGGVPSHNSSTGLIASSKDDSLTPFVRTNSVKTTLSESPLSSPAASPKFCRSTLPRKQDSDPHLDRNTLPKKGLRYTPTSQLRTQEDAKEWLRSHSAGGLQDTAANSPFSSGSSVTSPSGTRFNFSQLASPTTVTQMSLSNPTMLRTHSLSNADGQYDPYTDSRFRNSSMSLDEKSRTMSRSGSFRDGFEEESWEKSSVDNFVSRLHSSLHFSLPLFHHARYELVHGSSLSLVSSTSSVYSTPEEKCQSEIRKLRRELDASQEKVSALTTQLTANAHLVAAFEQSLGNMTIRLQSLTMTAEQKDSELNELRKTIELLKKQNAAAQAAINGVINTPELNCKGNGTAQSADLRIRRQHSSDSVSSINSATSHSSVGSNIESDSKKKKRKNWVNIQLRSSFKQAFGKKKSPKSASSHSDIEEMTDSSLPSSPKLPHNGSTGSTPLLRNSHSNSLISECMDSEAETVMQLRNELRDKEMKLTDIRLEALSSAHQLDQLREAMNRMQSEIEKLKAENDRLKSESQGSGCSRAPSQVSISASPRQSMGLSQHSLNLTESTSLDMLLDDTGECSARKEGGRHVKIVVSFQEEMKWKEDSRPHLFLIGCIGVSGKTKWDVLDGVVRRLFKEYIIHVDPVSQLGLNSDSVLGYSIGEIKRSNTSETPELLPCGYLVGENTTISVTVKGLAENSLDSLVFESLIPKPILQRYVSLLIEHRRIILSGPSGTGKTYLANRLSEYIVLREGRELTDGVIATFNVDHKSSKELRQYLSNLADQCNSENNAVDMPLVIILDNLHHVSSLGEIFNGLLNCKYHKCPYIIGTMNQATSSTPNLQLHHNFRWVLCANHTEPVKGFLGRFLRRKLMETEISGRVRNMELVKIIDWIPKVWHHLNRFLEAHSSSDVTIGPRLFLSCPIDVDGSRVWFTDLWNYSIIPYLLEAVREGLQLYGRRAPWEDPAKWVMDTYPWAASPQQHEWPPLLQLRPEDVGFDGYSMPREGSTSKQMPPSDAEGDPLMNMLMRLQEAANYSSPQSYDSDSNSNSHHDDILDSSLESTL

SEQ ID NO: 2922 - protein, 55 aa, Homo sapiens
MSSKYPRSVRRCLPLCALTLEAALILLFYFFTHYDASLEDQKGLVASYQVFGWPP

SEQ ID NO: 2923 - protein, 871 aa, Homo sapiens [sequence omitted]

SEQ ID NO: 2924 - protein, 234 aa, Homo sapiens
MAPRRARGCRTLGLPALLLLLLLRPPATRGITCPPPMSVEHADIWVKSYSLYSRERYICNSGFKRKAGTSSLTECVLNKATNVAHWTTPSLKCIKPAASSPSSNNTAATTAAIVPGSQLMPSKSPSTGTTEISSHESSHGTPSQTTAKNWELTASASHQPPGVYPQGHSDTTVAISTSTVLLCGLSAVSLLACYLKSRQTPPLASVEMEAMEALPVTWGTSSRDEDLENCSHHL

SEQ ID NO: 2925 - protein, 76 aa, Homo sapiens
CEVKTDFCQTVLPYLIHDILLQDTNESWRNLLSTHVQGFFTSCLRHFSQTSRSTTPANLDSDLLQEQFLMMLSGWI

SEQ ID NO: 2926 - protein, 359 aa, Homo sapiens
MGQDQTKQQIEKGLQLYQSNQTEKALQVWTKVLEKSSDLMGRFRVLGCLVTAHSEMGRYKEMLKFAVVQIDTARELEDADFLLESYLNLARSNEKLCEFHKTISYCKTCLGLPGTRAGAQLGGQVSLSMGNAFLGLSVFQKALESFEKALRYAHNNDDAMLECRVCCSLGSFYAQVKESMKIALQHGDRPLQALCLLCFADIHRSRGDLETAFPRYDSAMSIMTEIGNRLGQVQALLGVAKCWVARKALDKALDAIERAQDLAEEVGNKLSQLKLHCLSESIYRSKGLQRELRAHVVRFHECVEETELYCGLCGESIGEKNSRLQALPCSHIFHLRCLQNNGTRSCPNCRRSSMKPGFV

SEQ ID NO: 2927 - protein, 204 aa, Homo sapiens
MLPGLRRLLQAPASACLLLMLLALPLAAPSCPMLCTCYSSPPTVSCQANNFSSVPLSLPPSTQRLFLQNNLIRTLRPGTFGSNLLTLWLFSNNLSTIYPGTFRHLQALEELDLGDNRHLRSLEPDTFQGLERLQSLHLYRCQLSSLPGNIFRGLVSLQYLYLQENSLLHLQGKKEKGKSLLCSWRMDALKMEGIPVIVIHCYYY

SEQ ID NO: 2928 - protein, 598 aa, Homo sapiens
MRGGGGCVLALGGQRGFQKERRRMASGNGLPSSSALVAKGPCALGPFPRYIWIHQDTPQDSLDKTCHEIWKRVQGLPEASQPWTSMEQLSVPVVGTLRGNELSFQEEALELSSGKDEISLLVEQEFLSLTKEHSILVEESSGELEVPGSSPEGTRELAPCILAPPLVAGSNERPRASIIVGDKLLKQKVAMPVISSRQDCDSATSTVTDILCAAEVKSSKGTEDRGRILGDSNLQVSKLLSQFPLKSTETSKVPDNKNVLDKTRVTKDFLQDNLFSGPGPKEPTGLSPFLLLPPRPPPARPDKLPELPAQKRQLPVFAKICSKPKADPAVERHHLMEWSPGTKEPKKGQGSLFLSQWPQSQKDACGEEGCCDAVGTASLTLPPKKPTCPAEKNLLYEFLGATKNPSGQPRLRNKVEVDGPELKFNAPVTVADKNNPKYTGNVFTPHFPTAMTSATLNQPLWLNLNYPPPPVFTNHSTFLQYQGLYPQQAARMPYQQALHPQLGCYSQQVMPYNPQQMGQQIFRSSYTPLLSYIPFVQPNYPYPQRTPPKMSANPRDPPLMAGDGPQYLFPQGYGFGSTSGGPLMHSPYFSSSGNGINF

SEQ ID NO: 2929 - protein, 428 aa, Homo sapiens
MPHIPEDEEPPGEPQAAQSPAGQQGPPAAGVSCSPTPTIVLTGDATSPEGETDKNLANRVHSPHKRLSHRHLKVSTASLTSVDPAGHIIDLVNDQLPDISISEEDKKKNLALLEEAKLVSERFLTRRGRKSRSSPGDSPSAVSPNLSPSASPTSSRSNSLTVPTPPGLDVCSGPPSPLPGAPPQKGDEADVSSPHPGEPEHILMRNQNLVGLKLPDLSEAAEQEKGLPSELSPAIEEEESKSGLDVMPNISDVLLRKLRVHRSLPGSAPPLTEKEVENVFVQLSLAFRNDSYTLESRINQAERERNLTEENTEKELENFKASITSSASLWHHCEHRETYQKLLEDIAVLHRLAARLSSRAEVVGAVRQEKRMSKATEVMMQYVENLKRTYEKDHAELMEFKKLANQNSSRSCGPSEYASPEGQRCCGS

SEQ ID NO: 2930 - protein, 432 aa, Homo sapiens [sequence omitted]

SEQ ID NO: 2931 - protein, 1369 aa, Homo sapiens
MSLVLNDLLICCRQLEHDRATERKKEVEKFKRLIRDPETIKHLDRHSDSKQGKYLNWDAVFRFLQKYIQKETECLRIAKPNVSASTQASRQKKMQEISSLVKYFIKCANRRAPRLKCQELLNYIMDTVKDSSNGAIYGADCSNILLKDILSVRKYWCEISQQQWLELFSVYFRLYLKPSQDVHRVLVARIIHAVTKGCCSQTDGLNSKFLDFFSKAIQCARQEKSSSGLNHILAALTIFLKTLAVNFRIRVCELGDEILPTLLYIWTQHRLNDSLKEVIIELFQLQIYIHHPKGAKTQEKGAYESTKWRSILYNLYDLLVNEISHIGSRGKYSSGFRNIAVKENLIELMADICHQVFNEDTRSLEISQSYTTTQRESSDYSVPCKRKKIELGWEVIKDHLQKSQNDFDLVPWLQIATQLISKYPASLPNCELSPLLMILSQLLPQQRHGERTPYVLRCLTEVALCQDKRSNLESSQKSDLLKLWNKIWCITFRGISSEQIQAENFGLLGAIIQGSLVEVDREFWKLFTGSACRPSCPAVCCLTLALTTSIVPGTVKMGIEQNMCEVNRSFSLKESIMKWLLFYQLEGDLENSTEVPPILHSNFPHLVLEKILVSLTMKNCKAAMNFFQSVPECEHHQKDKEELSFSEVEELFLQTTFDKMDFLTIVRECGIEKHQSSIGFSVHQNLKESLDRCLLGLSEQLLNNYSSEITNSETLVRCSRLLVGVLGCYCYMGVIAEEEAYKSELFQKAKSLMQCAGESITLFKNKTNEEFRIGSLRNMMQLCTRCLSNCTKKSPNKIASGFFLRLLTSKLMNDIADICKSLASFIKKPFDRGEVESMEDDTNGNLMEVEDQSSMNLFNDYPDSSVSDANEPGESQSTIGAINPLAEEYLSKQDLLFLDMLKFLCLCVTTAQTNTVSFRAADIRRKLLMLIDSSTLEPTKSLHLHMYLMLLKELPGEEYPLPMEDVLELLKPLSNVCSLYRRDQDVCKTILNHVLHVVKNLGQSNMDSENTRDAQGQFLTVIGAFWHLTKERKYIFSVRMALVNCLKTLLEADPYSKWAILNVMGKDFPVNEVFTQFLADNHHQVRMLAAESINRLFQDTKGDSSRLLKALPLKLQQTAFENAYLKAQEGMREMSHSAENPETLDEIYNRKSVLLTLIAVVLSCSPICEKQALFALCKSVKENGLEPHLVKKVLEKVSETFGYRRLEDFMASHLDYLVLEWLNLQDTEYNLSSFPFILLNYTNIEDFYRSCYKVLIPHLVIRSHFDEVKSIANQIQEDWKSLLTDCFPKILVNILPYFAYEGTRDSGMAQQRETATKVYDMLKSENLLGKQIDHLFISNLPEIVVELLMTLHEPANSSASQSTDLCDFS

SEQ ID NO: 2932 - protein, 840 aa, Homo sapiens
MDYHEDDKRFRREEYEGNLLEAGLELERDEDTKIHGVGFVKIHAPWNVLCREAEFLKLKMPTKKMYHINETRGLLKKINSVLQKITDPIQPKVAEHRPQTMKRLSYPFSREKQHLFDLSDKDSFFDSKTRSTIVYEILKRTTCTKAKYSMGITSLLANGVYAAAYPLHDGDYNGENVEFNDRKLLYEEWARYGVFYKYQPIDLVRKYFGEKIGLYFAWLGVYTQMLIPASIVGIIVFLYGCATMDENIPSMEMCDQRHNITMCPLCDKTCSYWKMSSACATARASHLFDNPATVFFSVFMALWAATFMEHWKRKQMRLNYRWDLTGFEEEEDHPRAEYEARVLEKSLKKESRNKETDKVKLTWRDRFPAYLTNLVSIIFMIAVTFAIVLGVIIYRISMAAALAMNSSPSVRSNIRVTVTATAVIINLVVIILLDEVYGCIARWLTKIEVPKTEKSFEERLIFKAFLLKFVNSYTPIFYVAFFKGRFVGRPGDYVYIFRSFRMEECAPGGCLMELCIQLSIIMLGKQLIQNNLFEIGIPKMKKLIRYLKLKQQSPPDHEECVKRKQRYEVDYNLEPFAGLTPEYMEMIIQFGFVTLFVASFPLAPLFALLNNIIEIRLDAKKFVTELRRPVAVRAKDIGIWYNILRGIGKLAVIINAFVISFTSDFIPRLVYLYMYSKNGTMHGFVNHTLSSFNVSDFQNGTAPNDPLDLGYEVQICRYKDYREPPWSENKYDISKDFWAVLAARLAFVIVFQNLVMFMSDFVDWVIPDIPKDISQQIHKEKVLMVELFMREEQDKQQLLETWMEKERQKDEPPCNHHNTKACPDSLGSPAPSHAYHGGVL

SEQ ID NO: 2933 - protein, 276 aa, Homo sapiens
MVLLKLLEVYRKGSAGTFHKSTIFGNTIMTSQPVPNETIIVLPSNVINFSQAEKPEPTNQGQDSLKKHLHAEIKVIGTIQILCGMMVLSLGIILASASFSPNFTQVTSTLLNSAYPFIGPFFFIISGSLSIATEKRLTKLLVHSSLVGSILSALSALVGFIILSVKQATLNPASLQCELDKNNIPTRSYVSYFYHDSLYTTDCYTAKASLAGTLSLMLICTLLEFCLAVLTAVLRWKQAYSDFPGSVLFLPHSYIGNSGMSSKMTHDCGYEELLTS

SEQ ID NO: 2934 - protein, 357 aa, Homo sapiens
MLEMLEYNHYQVQTHLENPTKYHIQQAQRQQGFYKFEEQNRAESECPGMNTHSRASCMQMDDVIDDIISLESSYNEEILGLMDPALQMANTLPVSGNLIDLYGNQGLPPPGLTISNSCPANLPNIKRELTESEARALAKERQKKDNHNLIERRRRFNINDRIKELGTLIPKSNDPDMRWNKGTILKASVDYIRKLQREQQRAKELENRQKKLEHANRHLLLRIQELEMQARAHGLSLIPSTGLCSPDLVNRIIKQEPVLENCSQDLLQHHADLTCTTTLDLTDGTITFNNNLGTGTEANQAYSVPTKMGSKLEDILMDDTLSPVGVTDPLLSSVSPGASKTSSRRSSMSMEETEHTC

SEQ ID NO: 2935 - protein, 245 aa, Homo sapiens
TGNFFYNYMMGIEFNPRIGKWFDFKLFFNGRPGIVAWTLINLSFAAKQRELHSHVTNAMVLVNVLQAIYVIDFFWNETWYLKTIDICHDHFGWYLGWGDCVWLPYLYTLQKRTRRQGVCQRQSWGLTPGRWAPEPTLLSSPWAKHRLTPSPSPPRVCTWCTTPCSCPPRTPWASCCWAWWATTSSGWPTTRRTCSAARMGAASSGAGSPRSSSAPTHPPMGRGTTASCWCRASGAWPATSTTSAT

SEQ ID NO: 2936 - protein, 219 aa, Homo sapiens
MAPRRARGCRTLGLPALLLLLLLRPPATRGITCPPPMSVEHADIWVKSYSLYSRERYICNSGFKRKAGTSSLTECVLNKATNVAHWTTPSLKCIKPAASSPSSNNTAATTAAIVPGSQLMPSKSPSTGTTEISSHESSHGTPSQTTAKNWELTASASHQPPGVYPQGHSDTTVAISTSTVLLCGLSAVSLLACYLKSRASVCSCHPRSAGHTCSVGSVC

SEQ ID NO: 2937 - protein, 168 aa, Homo sapiens
MTSPEIASLSWGQMKVKGSNTTYKDCKVWPGGSRTWDWRETGTESLTLLPRLECSGAISAHCNLHLPGSCHSPASASQVAGTTGACHHTQHSPGVQPADVKEVVEKGVQTLVIGRGMSEALKVPSSTVEYLKKHGIDVRVLQTEQAVKEYNALVAQGVRVGGVFHSTC

SEQ ID NO: 2938 - protein, 112 aa, Homo sapiens
SQAEKPEPTNQGQDSLKKHLHAEIKVIGFIISGSLSIATEKRLTKLLVHSSLVGSILSALSALVGFIILSVKQATLNPASLQWNSLSDADLHSAGILPSCAHCCAAVETGLL

SEQ ID NO: 2939 - protein, 168 aa, Homo sapiens
MAATALLEAGLARVLFYPTLLYTLFRGKVPGRAHRDWYHRIDPTVLLGALPLRSLTRQVSRAGEPGPLPRPRRSVPVGPLGSPPSLLSHLFASAAGTGRERARGDHHERGVRDEVPVQLFTGVEETRSRAAAAQHSRHDWDPHLGQPPEGSPICSQVPVAGPVCLRAL

SEQ ID NO: 2940 - protein, 114 aa, Homo sapiens
MTSQPVPNETIIVLPSNVINFSQAEKPEPTNQGQDSLKKHLHAEIKVIGVHSSLVGSILSALSALVGFIILSVKQATLNPASLQWNSLSDADLHSAGILPSCAHCCAAVETGLL

SEQ ID NO: 2941 - protein, 107 aa, Homo sapiens
AVEFLEQAQQVSGLLAQLWRAQPAAILPCLKELFAVISCAEEEPPSSALASVVQHLPLELMDGVVRNLSNDDSVTDSQMLTAISRFSLSCCTPSSGELPCLCSSTCS

SEQ ID NO: 2942 - protein, 198 aa, Homo sapiens
MDSLQKQDLRRPKIHGAVQASPYQPPTLASLQRLLWVRQAATLNHIDEVWPSLFLGDAYAARDKSKLIQLGITHVVNAAAGKFQVDTGAKFYRGMSLEYYGIEADDNPFFDLSVYFLPVARYIRAALSVPQGRVLVHCAMGVSRSATLVLAFLMICENMTLVEAIQTVQAHRNICPNSGFLRQLQVLDNRLGRETGRF

SEQ ID NO: 2943 - protein, 78 aa, Homo sapiens
MASSSTVPLGFHYETKYVVLSYLGLLSQEKLQEQHLSSPQGVQLDIASQSLDQEILLKVKTEIEEELKSLDKEISEGQ

SEQ ID NO: 2944 - protein, 559 aa, Homo sapiens
MLKSKTFLKKTRAGGVMKIVREHYLRDDIGCGAPGCAACGGAHEGPALEPQPQDPASSVCPQPHYLLPDTNVLLHQIDVLEDPAIRNVIVLQTVLQEVRNRSAPVYKRIRDVTNNQEKHFYTFTNEHHRETYVEQEQGENANDRNDRAIRVAAKWYNEHLKKMSADNQLQVIFITNDRRNKEKAIEEGIPAFTCEEYVKSLTANPELIDRLACLSEEGNEIESGKIIFSEHLPLSKLQQGIKSGTYLQGTFRASRENYLEATVWIHGDNEENKEIILQGLKHLNRAVHEDIVAVELLPKSQWVAPSSVVLHDEGQNEEDVEKEEETERMLKTAVSEKMLKPTGRVVGIIKRNWRPYCGMLSKSDIKESRRHLFTPADKRIPRIRIETRQASTLEGRRIIVAIDGWPRNSRYPNGHFVRNLGDVGEKETETEVLLLEHDVPHQPFSQAVLSFLPKMPWSITEKDMKNREDLRHLCICSVDPPGCTDIDDALHCRELENGNLEVGVHIADVSHFIRPGNALDQESARRGTTVYLCEKRIDMVPELLSSNLCSLKCDVDRHL

SEQ ID NO: 2945 - protein, 191 aa, Homo sapiens
MRAAGVGLVDCHCHLSAPDFDRDLDDVLEKAKKANVVALVAVAEHSGEFEKIMQLSERYNGFVLPCLGVHPVQGLPPEDQRSVTLKDLDVALPIIENYKDRLLAIGEVGLDFSPRFAGTGEQKEEQRQVLIRQIQLAKRLNLPVNVHSRSAGRPTINLLQEQAETCETIAFNFYMLRNRFTCTRTRKTGTE

SEQ ID NO: 2946 - protein, 721 aa, Homo sapiens
MSEFRIHHDVNELLSLLRVHGGDGAEVYIDLLQKNRTPYVTTTVSAHSAKVKIAEFSRTPEDFLKKYDELKSKNTRNLDPLVYLLSKLTEDKETLQYLQQNAKERAELAAAAVGSSTTSINVPAAASKISMQELEELRKQLGSVATGSTLQQSLELKRKMLRDKQNKKNSGQHLPIFPAWVYERPALIGDFLIGAGISTDTALPIGTLPLASQESAVVEDLLYVLVGVDGRYVSAQPLAGRQSRTFLVDPNLDLSIRELVHRILPVAASYSAVTRFIEEKSSFEYGQVNHALAAAMRTLVKEHLILVSQLEQLHRQGLLSLQKLWFYIQPAMRTMDILASLATSVDKGECLGGSTLSLLHDRSFSYTGDSQAQELCLYLTKAASAPYFEVLEKWIYRGIIHDPYSEFMVEEHELRKERIQEDYNDKYWDQRYTIVQQQIPSFLQKMADKILSTGKYLNVVRECGHDVTCPVAKEIIYTLKERAYVEQIEKAFNYASKVLLDFLMEEKELVAHLRSIKRYFLMDQGDFFVHFMDLAEEELRKPVEDITPPRLEALLELALRMSTANTDPFKDDLKIDLMPHDLITQLLRVLAIETKQEKAMAHADPTELALSGLEAFSFDYIVKWPLSLIINRKALTRYQMLFRHMFYCKHVERQLCSVWISNKTAKQHSLHSAQWFAGAFTLRQRMLNFVQNIQYYMMFEVMEPTWHILEKNLKSASWTPA

SEQ ID NO: 2947 - protein, 154 aa, Homo sapiens
LEPGSPKARQGIIPEEYVLTRLAEDPAKPRYRARQRRARFVSKKGNCNVAHKNIREQGRFLQDVFTTLVDLKWPHTLLIFTMSFLCSWLLFAMAWWLIAFAHGDLAPSEGTAEPCVTSIHSFSSAFLFSIEVQVTIGFGGRMVTEECPLAILIL

SEQ ID NO: 2948 - protein, 115 aa, Homo sapiens
MWRPVQLCHFHSALLHSRQKPWPSPAVFFRRNVRGLPPRFSSPTPLWRKVLSTAVVGAPLLLGARYVMAEAREKRRMRLVVDGMGRFGRPCLPRPWRPTLLVSSSLPSGPQAAGL

SEQ ID NO: 2949 - protein, 747 aa, Homo sapiens
MGRSNSRSHSSRSKSRSQSSSRSRSRSHSRKKRYSSRSRSRTYSRSRSRDRMYSRDYRRDYRNNRGMRRPYGYRGRGRGYYQGGGGRYHRGGYRPVWNRRHSRSPRRGRSRSRSPKRRSVSSQRSRSRSRRSYRSSRSPRSSSSRSSSPYSKSPVSKRRGSQEKQTKKAEGEPQEESPLKSKSQEEPKDTFEHDPSESIDEFNKSSATSGDIWPGLSAYDNSPRSPHSPSPIATPPSQSSSCSDAPMLSTVHSAKNTPSQHSHSIQHSPERSGSGSVGNGSSRYSPSQNSPIHHIPSRRSPAKTIAPQNAPRDESRGRSSFYPDGGDQETAKTGKFLKSPPLHKNLDAREKSTFREESPLRIKMIASDSHRPEVKLKMAPVPLDDSNRPASLTKDRLLASTLVHSVKKEQEFRSIFDHIKLPQASKSTSESFIQHIVSLVHHVKEQYFKSAAMTLNERFTSYQKATEEHSTRQKSPEIHRRIDISPSTLRKHTRLAGEERVFKEENQKGDKKLRCDSADLRHDIDRRRKERSKERGDSKGSRESSGSRKQEKTPKDYKEYKSYKDDSKHKREQDHSRSSSSSASPSSPSSREEKESKKEREEEFKTHHEMKEYSGFAGVSRPRGTFFRIRGRGRARGVFAGTNTGPNNSNTTFQKRPKEEEWDPEYTPKSKKYFLHDDRDDGVDYWAKRGRGRGTFQRGRGRFNFKKSGSSPKWTHDKYQGDGIVEDEEETMENNEEKKDRRKEEKE

SEQ ID NO: 2950 - protein, 390 aa, Homo sapiens
MLRSTSTVTLLSGGAARTPGAPSRRANVCRLRLTVPPESPVPEQCEKKIERKEQLLDLSNGEPTRKLPQGVVYGVVRRSDQNQQKEMVVYGWSTSQLKEEMNYIKDVRATLEKVRKRMYGDYDEMRQKIRQLTQELSVSHAQQEYLENHIQTQSSALDRFNAMNSALASDSIGLQKTLVDVTLENSNIKDQIRNLQQTYEASMDKLREKQRQLEVAQVENQLLKMKVESSQEANAEVMREMTKKLYSQYEEKLQEEQRKHSAEKEALLEETNSFLKAIEEANKKMQAAEISLEEKDQRIGELDRLIERMEKERHQLQLQLLEHETEMSGELTDSDKERYQQLEEASASLRERIRHLDDMVHCQQKKVKQMVEEIMSHELFSRFSLRLFGR

SEQ ID NO: 2951 - protein, 82 aa, Homo sapiens
MEASVLSPTSWEKRRAWLRQSRNWQTQVLEEEAAAALQDVPDPEPSSLDDVFQEGNPINKIEDWLQDCGYSEEGFSEEAGQF

SEQ ID NO: 2952 - protein, 160 aa, Homo sapiens
MSVCYRPPGNETLLSWKTSRATGTAFLLLAALLGLPGNGFVVWSLAGWRPARGRPLAATLVLHLALADGAVLLLTPLFVAFLTRQAWPLGQAGCKAVYYVCALSMYASVLLTGLLSLQRCLAVTRPFLAPRLRSPALARRLLLAVWLAALLLAVPAAVYR

SEQ ID NO: 2953 - protein, 107 aa, Homo sapiens
MLRLYPGPMVTEAEGKGGPEMASLSSSVVPVSFISTLRESVLDPGVGGEGASDKQRSKLSLSHSMIPAAKIHTELCLPAFFSPAGTQRRFQQPQHHLTLSIIHTAAR

SEQ ID NO: 2954 - protein, 136 aa, Homo sapiens
MSWKKALRIPGDLRVATVTLMLAMLSSLLAEGRDSPEDFVFQFKGMCYFTNGTERVRLVTRYIYNREEYARFDSDVGVYRAVTPQGRPDAEYWNSQKEVLEGTRAELDTVCRHNYEVAFRGILQRRGMVTGLSRSW

SEQ ID NO: 2955 - protein, 95 aa, Homo sapiens
MENHKSNNKENITIVDISRKINQLPEAERNLLENGSVYVGLNAALCGLIANSLFRRILNVTKARIAAGLPMAGIPFLTTDLTYRCFVIWIVKPVP

SEQ ID NO: 2956 - protein, 5762 aa, Homo sapiens
MGAPSACRTLVLALAAMLVVPQAETQGPVEPSWENAGHTMDGGAPTSSPTRRVSFVPPVTVFPSLSPLNPAHNGRVCSTWGDFHYKTFDGDVFRFPGLCNYVFSEHCRAAYEDFNVQLRRGLVGSRPVVTRVVIKAQGLVLEASNGSVLINGQREELPYSRTGLLVEQSGDYIKVSIRLVLTFLWNGEDSALLELDPKYANQTCGLCGDFNGLPAFNEFYAHNARLTPLQFGNLQKLDGPTEQCPDPLPLPAGNCTDEEGICHRTLLGPAFAECHALVDSTAYLAACAQDLCRCPTCPCATFVEYSRQCAHAGGQPRNWRCPELCPRTCPLNMQHQECGSPCTDTCSNPQRAQLCEDHCVDGCFCPPGTVLDDITHSGCLPLGQCPCTHGGRTYSPGTSFNTTCSSCTCSGGLWQCQDLPCPGTCSVQGGAHISTYDEKLYDLHGDCSYVLSKKCADSSFTVLAELRKCGLTDNENCLKAVTLSLDGGDTAIRVQADGGVFLNSIYTQLPLSAANITLFTPSSFFIVVQTGLGLQLLVQLVPLMQVFVRLDPAHQGQMCGLCGNFNQNQADDFTALSGVVEATGAAFANTWKAQAACANARNSFEDPCSLSVENENYARHWCSRLTDPNSAFSRCHSIINPKPFHSNCMFDTCNCERSEDCLCAALSSYVHACAAKGVQLSDWRDGVCTKYMQNCPKSQRYAYVVDACQPTCRGLSEADVTCSVSFVPVDGCTCPAGTFLNDAGACVPAQECPCYAHGTVLAPGEVVHDEGAVCSCTGGKLSCLGASLQKSTGCAAPMVYLDCSNSSAGTPGAECLRSCHTLDVGCFSTHCVSGCVCPPGLVSDGSGGCIAEEDCPCVHNEATYKPGETIRVDCNTCTCRNRRWECSHRLCLGTCVAYGDGHFITFDGDRYSFEGSCEYILAQDYCGDNTTHGTFRIVTENIPCGTTGTTCSKAIKLFVESYELILQEGTFKAVARGPGGDPPYKIRYMGIFLVIETHGMAVSWDRKTSVFIRLHQDYKGRVCGLCGNFDDNAINDFATRSRSVVGDALEFGNSWKLSPSCPDALAPKDPCTANPFRKSWAQKQCSILHGPTFAACRSQVDSTKYYEACVNDACACDSGGDCECFCTAVAAYAQACHDAGLCVSWRTPDTCPLFCDFYNPHGGCEWHYQPCGAPCLKTCRNPSGHCLVDLPGLEGCYPKCPPSQPFFNEDQMKCVAQCGCYDKDGNYYDVGARVPTAENCQSCNCTPSGIQCAHSLEACTCTYEDRTYSYQDVIYNTTDGLGACLIAICGSNGTIIRKAVACPGTPATTPFTFTTAWVPHSTTSPALPVSTVCVREVCRWSSWYNGHRPEPGLGGGDFETFENLRQRGYQVCPVLADIECRAAQLPDMPLEELGQQVDCDRMRGLMCANSQQSPPLCHDYELRVLCCEYVPCGPSPAPGTSPQPSLSASTEPAVPTPTQTTATEKTTLWVTPSIRSTAALTSQTGSSSGPVTVTPSAPGTTTCQPRCQWTEWFDEDYPKSEQLGGDVESYDKIRAAGGHLCQQPKDIECQAESFPNWTLAQVGQKVHCDVHFGLVCRNWEQEGVFKMCYNYRIRVLCCSDDHCRGRATTPPPTTELETATTTTTQALFSTPQPTSSPGLTRAPPASTTAVPTLSEGLTSPRYTSTLGTATTGGPTTPAGSTEPTVPGVATSTLPTRSALPGTTGSLGTWRPSQPPTLAPTTMATSRARPTGTASTASKEPLTTSLAPTLTSELSTSQAETSTPRTETTMSPLTNTTTSQGTTRCQPKCEWTEWFDVDFPTSGVAGGDMETFENIRAAGGKMCWAPKSIECRAENYPEVSIDQVGQVLTCSLETGLTCKNEDQTGRFNMCFNYNVRVLCCDDYSHCPSTPATSSTATPSSTPGTTWILTKPTTTATTTASTGSTATPTSTLRTAPPPKVLTTTATTPTVTSSKATPSSSPGTATALPALRSTATTPTATSVTPIPSSSLGTTWTRLSQTTTPTATMSTATPSSTPETAHTSTVLTATATTTGATGSVATPSSTPGTAHTTKVPTTTTTGFTATPSSSPGTALTPPVWISTTTTPTTRGSTVTPSSIPGTTHTATVLTTTTTTVATGSMATPSSSTQTSGTPPSLTTTATTITATGSTTNPSSTPGTTPIPPVLTTTATTPAATSNTVTPSSALGTTHTPPVPNTMATTHGRSLPPSSPHTVRTAWTSATSGILGTTHITEPSTVTSHTLAATTGTTQHSTPALSSPHPSSRTTESPPSPGTTTPGHTTATSRTTATATPSKTRTSTLLPSSPTSAPITTVVTMGCEPQCAWSEWLDYSYPMPGPSGGDFDTYSNIRAAGGAVCEQPLGLECRAQAQPGVPLRELGQVVECSLDFGLVCRNREQVGKFKMCFNYEIRVFCCNYGHCPSTPATSSTAMPSSTPGTTWILTELTTTATTTESTGSTATPSSTPGTTWILTEPSTTATVTVPTGSTATASSTQATAGTPHVSTTATTPTVTSSKATPFSSPGTATALPALRSTATTPTATSFTAIPSSSLGTTWTRLSQTTTPTATMSTATPSSTPETVHTSTVLTTTATTTGATGSVATPSSTPGTAHTTKVLTTTTTGFTATPSSSPGTARTLPVWISTTTTPTTRGSTVTPSSIPGTTHTPTVLTTTTTTVATGSMATPSSSTQTSGTPPSLTTTATTITATGSTTNPSSTPGTTPIPPVLTTTATTPAATSSTVTPSSALGTTHTPPVPNTTATTHGRSLSPSSPHTVRTAWTSATSGTLGTTHITEPSTGTSHTPAATTGTTQHSTPALSSPHPSSRTTESPPSPGTTTPGHTRATSRTTATATPSKTRTSTLLPSSPTSAPITTVVTMGCEPQCAWSEWLDYSYPMPGPSGGDFDTYSNIRAAGGAVCEQPLGLECRAQAQPGVPLRELGQVVECSLDFGLVCRNREQVGKFKMCFNYEIRVFCCNYGHCPSTPATSSTATPSSTPGTTWILTEQTTAATTTATTGSTAIPSSTPGTAPPPKVLTSTATTPTATSSKATSSSSPRTATTLPVLTSTATKSTATSFTPIPSFTLGTTGTLPEQTTTPMATMSTIHPSSTPETTHTSTVLTTKATTTRATSSMSTPSSTPGTTWILTELTTAATTTAATGPTATPSSTPGTTWILTEPSTTATVTVPTGSTATASSTRATAGTLKVLTSTATTPTVISSRATPSSSPGTATALPALRSTATTPTATSVTAIPSSSLGTAWTRLSQTTTPTATMSTATPSSTPETVHTSTVLTTTTTTTRATGSVATPSSTPGTAHTTKVPTTTTTGFTATPSSSPGTALTPPVWISTTTTPTTRGSTVTPSSIPGTTHTATVLTTTTTTVATGSMATPSSSTQTSGTPPSLTTTATTITATGSTTNPSSTPGTTPIPPVLTTTATTPAATSSTVTPSSALGTTHTPPVPNTTATTHGRSLPPSSPHTVRTAWTSATSGILGTTHITEPSTVTSHTPAATTSTTQHSTPALSSPHPSSRTTESPPSPGTTTPGHTRGTSRTTATATPSKTRTSTLLPSSPTSAPITTVVTTGCEPQCAWSEWLDYSYPMPGPSGGDFDTYSNIRAAGGAVCEQPLGLECRAQAQPGVPLRELGQVVECSLDFGLVCRNREQVGKFKMCFNYEIRVFCCNYGHCPSTPATSSTATPSSTPGTTWILTKLTTTATTTESTGSTATPSSTPGTTWILTEPSTTATVTVPTGSTATASSTQATAGTPHVSTTATTPTVTSSKATPFSSPGTATALPALRSTATTPTATSFTAIPSSSLGTTWTRLSQTTTPTATMSTATPSSTPETAHTSTVLTTTATTTRATGSVATPSSTPGTAHTTKVPTTTTTGFTVTPSSSPGTARTPPVWISTTTTPTTSGSTVTPSSVPGTTHTPTVLTTTTTTVATGSMATPSSSTQTSGTPPSLITTATTITATGSTTNPSSTPGTTPIPPVLTTTATTPAATSSTVTPSSALGTTHTPPVPNTTATTHGRSLSPSSPHTVRTAWTSATSGTLGTTHITEPSTGTSHTPAATTGTTQHSTPALSSPHPSSRTTESPPSPGTTTPGHTTATSRTTATATPSKTRTSTLLPSSPTSAPITTVVTTGCEPQCAWSEWLDYSYPMPGPSGGDFDTYSNIRAAGGAVCEQPLGLECRAQAQPGVPLGELGQVVECSLDFGLVCRNREQVGKFKMCFNYEIRVFCCNYGHCPSTPATSSTAMPSSTPGTTWILTELTTTATTTASTGSTATPSSTPGTAPPPKVLTSPATTPTATSSKATSSSSPRTATTLPVLTSTATKSTATSVTPIPSSTLGTTGTLPEQTTTPVATMSTIHPSSTPETTHTSTVLTTKATTTRATSSTSTPSSTPGTTWILTELTTAATTTAATGPTATPSSTPGTTWILTELTTTATTTASTGSTATPSSTPGTTWILTEPSTTATVTVPTGSTATASSTQATAGTPHVSTTATTPTVTSSKATPSSSPGTATALPALRSTATTPTATSFTAIPSSSLGTTWTRLSQTTTPTATMSTATPSSTPETVHTSTVLTATATTTGATGSVATPSSTPGTAHTTKVPTTTTTGFTATPSSSPGTALTPPVWISTTTTPTTTTPTTSGSTVTPSSIPGTTHTARVLTTTTTTVATGSMATPSSSTQTSGTPPSLTTTATTITATGSTTNPSSTPGTTPITPVLTSTATTPAATSSKATSSSSPRTATTLPVLTSTATKSTATSFTPIPSSTLWTTWTVPAQTTTPMSTMSTIHTSSTPETTHTSTVLTTTATMTRATNSTATPSSTLGTTRILTELTTTATTTAATGSTATLSSTPGTTWILTEPSTIATVMVPTGSTATASSTLGTAHTPKVVTTMATMPTATASTVPSSSTVGTTRTPAVLPSSLPTFSVSTVSSSVLTTLRPTGFPSSHFSTPCFCRAFGQFFSPGEVIYNKTDRAGCHFYAVCNQHCDIDRFQGACPTSPPPVSSAPLSSPSPAPGCDNAIPLRQVNETWTLENCTVARCVGDNRVVLLDPKPVANVTCVNKHLPIKVSDPSQPCDFHYECECICSMWGGSHYSTFDGTSYTFRGNCTYVLMREIHARFGNLSLYLDNHYCTASATAAAARCPRALSIHYKSMDIVLTVTMVHGKEEGLILFDQIPVSSGFSKNGVLVSVLGTTTMRVDIPALGVSVTFNGQVFQARLPYSLFHNNTEGQCGTCTNNQRDDCLQRDGTTAASCKDMAKTWLVPDSRKDGCWAPTGTPPTASPAAPVSSTPTPTPCPPQPLCDLMLSQVFAECHNLVPPGPFFNACISDHCRGRLEVPCQSLEAYAELCRARGVCSDWRGATGGLCDLTCPPTKVYKPCGPIQPATCNSRNQSPQLEGMAEGCFCPEDQILFNAHMGICVQACPCVGPDGFPKFPGERWVSNCQSCVCDEGSVSVQCKPLPCDAQGQPPPCNRPGFVTVTRPRAENPCCPETVCVCNTTTCPQSLPVCPPGQESICTQEEGDCCPTFRCRPQLCSYNGTFYGVGATFPGALPCHMCTCLSGDTQDPTVQCQEDACNNTTCPQGFEYKRVAGQCCGECVQTACLTPDGQPVQLNETWVNSHVDNCTVYLCEAEGGVHLLTPQPASCPDVSSCRGSLRKTGCCYSCEEDSCQVRINTTILWHQGCETEVNITFCEGSCPGASKYSAEAQAMQHQCTCCQERRVHEETVPLHCPNGSAILHTYTHVDECGCTPFCVPAPMAPPHTRGFPAQEATAV

SEQ ID NO: 2957 - protein, 56 aa, Homo sapiens
EESTVHVGRMLKENHCLVALHMCKHDIKNSGIQQLCDALYLNSSLRYLDVSWHIQT

SEQ ID NO: 2958 - protein, 407 aa, Homo sapiens
MLRSTSTVTLLSGGAARTPGAPSRRANVCRLRLTVPPESPVPEQCEKKIERKEQLLDLSNGEPTRKLPQGVVYGVVRRSDQNQQKEMVVYGWSTSQLKEEMNYIKDVRATLEKVRKRMYGDYDEMRQKIRQLTQELSVSHAQQEYLENHIQTQSSALDRFNAMNSALASDSIGLQKTLVDVTLENSNIKDQIRNLQQTYEASMDKLREKQRQLEVAQVENQLLKMKVESSQEANAEVMREMTKKLYSQYEEKLQEEQRKHSAEKEALLEETNSFLKAIEEANKKMQAAEISLEEKDQRIGELDRLIERMEKERHQLQLQLLEHETEMSGELTDSDKERYQQLEEASASLRERIRHLDDMVHCQQKKVKQMVEEIESLKKKLQQKQLLILQLLEKISFLEGEVTFSTK

SEQ ID NO: 2959 - protein, 548 aa, Homo sapiens
MAGGVWGRSRAREAPVGALTLTALTEGIRARQGQPQGPPSAGPQPKSWEVKPEAEPQTQALTAPSEAEPGRGATVPEAGSEPCSLNSALEPAPEGPHQVPQSSWEEGVLADLALYTAACLEEAGFAGTQATVLTLSSALEARGERLEDQVHALVRGLLAQVPSLAEGRPWRAALRVLSALALEHARDVVCALLPRSLPADRVAAELWRSLSRNQRVNGQVLVQLLWALKGASGPEPQALAATRALGEMLAVSGCVGATRGFYPHLLLALVTQLHKLARSPCSPDMPKIWVLSHRGPPHSHASSHCPPAHCPHHQLCCGGLEGAAHRGWRPHGGHVHGAGRRLEEAGGSPHPPGGRPAAGQCYGGTCRPPPARPLRRLAPSASQRGRPAASHGYGLLHRAVAEPAHRTAPAGGGHPGATPHLAGRPRTHCALVGPAGPGPPRAESQEGAAREHAAAGAPGRTGRRRRAARGCSAGRPEEAPAAAPGACAAPERGAGTAPPSATGRHTGLNPRLGRRAPWDSGAPGPGRAPAGAPRPPAEAGAAESRAAA

SEQ ID NO: 2960 - protein, 248 aa, Homo sapiens
MTSQPVPNETIIVLPSNVINFSQAEKPEPTNQGQDSLKKHLHAEIKVIGTIQILCGMMVLSLGIILASASFSPNFTQVTSTLLNSAYPFIGPFFFIISGSLSIATEKRLTKLLVHSSLVGSILSALSALVGFIILSVKQATLNPASLQCELDKNNIPTRSYVSYFYHDSLYTTDCYTAKASLAGTLSLMLICTLLEFCLAVLTAVLRWKQAYSDFPGSVLFLPHSYIGNSGMSSKMTHDCGYEELLTS

SEQ ID NO: 2961 - protein, 134 aa, Homo sapiens
MEERGDSEPTPGCSGLGPGGVRGFGDGGGAPSWAPEDAWMGTHPKYLEMMELDIGDATQVYVAFLVYLDLMESKSWHEVNCVGLPELQLICLVGTEIEGEGLQTVVPTPITASLSHNRIREILKASRKLQEYFS

SEQ ID NO: 2962 - protein, 186 aa, Homo sapiens
GSRESSGSRKQEKTPKDYKEYKSYKDDSSREEKESKKEREEEFKTHHEMKEYSGFAGVSRPRGTFFRIRGRGRARGVFAGTNTGPNNSNTTFQKRPKEEEWDPEYTPKSKKYFLHDDRDDGVDYWAKRGRGRGTFQRGRGRFNFKKSGSSPKWTHDKYQGDGIVEDEEETMENNEEKKDRRKEEKE

SEQ ID NO: 2963 - protein, 862 aa, Homo sapiens
MVAVVGEQFTLECGPPWGHPEPTVSWWKDGKPLALQPGRHTVSGGSLLMARAEKSDEGTYMCVATNSAGHRESRAARVSIQEPQDYTEPVELLAVRIQLENVTLLNPDPAEGPKPRPAVWLSWKVSGPAAPAQSYTALFRTQTAPGGQGAPWAEELLAGWQSAELGGLHWGQDYEFKVRPSSGRARGPDSNVLLLRLPEKVPSAPPQEVTLKPGNGTVFVSWVPPPAENHNGIIRGYQVWSLGNTSLPPANWTVVGEQTQLEIATHMPGSYCVQVAAVTGAGAGEPSRPVCLLLEQAMERATQEPSEHGPWTLEQLRATLKRPEVIATCGVALWLLLLGTAVCIHRRRRARVHLGPGLYRYTSEDAILKHRMDHSDSQWLADTWRSTSGSRDLSSSSSLSSRLGADARDPLDCRRSLLSWDSRSPGVPLLPDTSTFYGSLIAELPSSTPARPSPQVPAVRRLPPQLAQLSSPCSSSDSLCSRRGLSSPRLSLAPAEAWKAKKKQELQHANSSPLLRGSHSLELRACELGNRGSKNLSQSPGAVPQALVAWRALGPKLLSSSNELVTRHLPPAPLFPHETPPTQSQQTQPPVAPQAPSSILLPAAPIPILSPCSPPSPQASSLSGPSPASSRLSSSSLSSLGEDQDSVLTPEEVALCLELSEGEETPRNSVSPMPRAPSPPTTYGYISVPTASEFTDMGRTGGGVGPKGGVLLCPPRPCLTPTPSEGSLANGWGSASEDNAASARASLVSSSDGSFLADAHFARALAVAVDSFGFGLEPREADCVFIDASSPPSPRDEIFLTPNLSLPLWEWRPDWLEDMEVSHTQRLGRGMPPWPPDSQISSQRSQLHCRMPKAGASPVDYS

SEQ ID NO: 2964 - protein, 374 aa, Homo sapiens
MPQELPQSPRTRQPEPDFYCVKWIPWKGEQTPIITQSTNGPCPLLAIMNILFLQWKVKLPPQKEVITSDELMAHLGNCLLSIKPQEKSEGLQLNFQQNVDDAMTVLPKLATGLDVNVRFTGVSDFEYTPECSVFDLLGIPLYHGWLVDPQSPEAVRAVGKLSYNQLVERIITCKHSSDTNLVTEGLIAEQFLETTAAQLTYHGLCELTAAAKEGELSVFFRNNHFSTMTKHKSHLYLLVTDQGFLQEEQVVWESLHNVDGDSCFCDSDFHLSHSLGKGPGAEGGSGSPETQLQVDQDYLIALSLQQQQPRGPLGLTDLELAQQLQQEEYQQQQAAQPVRMRTRVLSLQGRGATSGRPAGERRQRPKHESDCILL

SEQ ID NO: 2965 - protein, 168 aa, Homo sapiens
LNVGHLKLTFCSVGPTECAALAFVLQHLRRPVALQLDYNSVGDIGVEQLLPCLGVCKALYLRDNNISDRGICKLIECALHCEQLQKLALGNNYITAAGAQVLAEGLRGNTSLQFLGFWGNRVGDEGAQALAEALGDHQSLRWLSLVGNNIGSVGAQALALMLAKNVML

SEQ ID NO: 2966 - protein, 214 aa, Homo sapiens
MILNKALLLGALALTTVMSPCGGEDIVADHVASCGVNLYQFYGPSGQYTHEFDGDEQFYVDLERKETAWRWPEFSKFGGFDPQGALRNMAVAKHNLNIMIKRYNSTAATNEVPEVTVFSKSPVTLGQPNTLICLVDNIFPPVVNITWLSNGQSVTEGVSETSFLSKSDHSFFKISYLTFLPSADEIYDCKVEHWGLDQPLLKHWGASPSTGAEE

SEQ ID NO: 2967 - protein, 1493 aa, Homo sapiens
MLWPRNLTSWDDSSSVSSGISDTIDNLSTDDINTSSSISSYANTPASSRKNLDVQTDAEKHSQVERNSLWSGDDVKKSDGGSDSGIKMEPGSKWRRNPSDVSDESDKSTSGKKNPVISQTGSWRRGMTAQVGITMPRTKPSAPAGALKTPGTGKTDDAKVSEKGRLSPKASQVKRSPSDAGRSSGDESKKPLPSSSRTPTANANSFGFKKQSGSAAGLAMITASGVTVTSRSATLGKIPKSSALVSRSAGRKSSMDGAQNQDDGYLALSSRTNLQYRSLPRPSKSNSRNGAGNRSSTSSIDSNISSKSAGLPVPKLREPSKTALGSSLPGLVNQTDKEKGISSDNESVASCNSVKVNPAAQPVSSPAQTSLQPGAKYPDVASPTLRRLFGGKPTKQVPIATAENMKNSVVISNPHATMTQQGNLDSPSGSGVLSSGSSSPLYSKNVDLNQSPLASSPSSAHSAPSNSLTWGTNASSSSAVSKDGLGFQSVSSLHTSCESIDISLSSGGVPSHNSSTGLIASSKDDSLTPFVRTNSVKTTLSESDPHLDRNTLPKKGLRYTPTSQLRTQEDAKEWLRSHSAGGLQDTAANSPFSSGSSVTSPSGTRFNFSQLASPTTVTQMSLSNPTMLRTHSLSNADGQYDPYTDSRFRNSSMSLDEKSRTMSRSGSFRDGFEEVHGSSLSLVSSTSSVYSTPEEKCQSEIRKLRRELDASQEKVSALTTQLTANAHLVAAFEQSLGNMTIRLQSLTMTAEQKDSELNELRKTIELLKKQNAAAQAAINGVINTPELNCKGNGTAQSADLRIRRQHSSDSVSSINSATSHSSVGSNIESDSKKKKRKNWLRSSFKQAFGKKKSPKSASSHSDIEEMTDSSLPSSPKLPHNGSTGSTPLLRNSHSNSLISECMDSEAETVMQLRNELRDKEMKLTDIRLEALSSAHQLDQLREAMNRMQSEIEKLKAENDRLKSESQGSGCSRAPSQVSISASPRQSMGLSQHSLNLTESTSLDMLLDDTGECSARKEGGRHVKIVVSFQEEMKWKEDSRPHLFLIGCIGVSGKTKWDVLDGVVRRLFKEYIIHVDPVSQLGLNSDSVLGYSIGEIKRSNTSETPELLPCGYLVGENTTISVTVKGLAENSLDSLVFESLIPKPILQRYVSLLIEHRRIILSGPSGTGKTYLANRLSEYIVLREGRELTDGVIATFNVDHKSSKELRQYLSNLADQCNSENNAVDMPLVIILDNLHHVSSLGEIFNGLLNCKYHKCPYIIGTMNQATSSTPNLQLHHNFRWVLCANHTEPVKGFLGRFLRRKLMETEISGRVRNMELVKIIDWIPKVWHHLNRFLEAHSSSDVTIGPRLFLSCPIDVDGSRVWFTDLWNYSIIPYLLEAVREGLQLYGRRAPWEDPAKWVMDTYPWAASPQQHEWPPLLQLRPEDVGFDGYSMPREGSTSKQMPPSDAEGDPLMNMLMRLQEAANYSSPQSYDSDSNSNSHHDDILDSSLESTL

SEQ ID NO: 2968 - protein, 781 aa, Homo sapiens
MGQLRDWFPNTQDLAGNDQENIRHADRNNSDDNHLASEDTSAKQSGKPGIYEDRDPLRVSISREQSFFGSPLAHDPFSCLQLVGQENVCGDDYDEAVKLKESVVENHAVLSYAVEEEHAYLGPTVKPDDKAKTLSYEPLSSATVSTGSLLSYENTDLSLTDPESFSEHMDDSKQESTTSKEEETNIISSIVPSTQDIYQRQNSSDVHKSLLPAVDETTCGHTHFQQMIDKYINEANLIPEKTDLQELEHIFPNLHHQLFKPLEPHPDFDLSSSSSGISPDNRDFYQRSDSSSESHCATGLSKSTVYFTALRRTSMHSSLNTSPNQQPDTNLAHVGAHSFATENIIGGSEQCFEQLQPEYSSQEESQHADLPSIFSIEARDSSQGMKNQNYPSEEHTEILQNKKKIVHFQLSIGNLSSVYSSSDEANVFDQLNVQHSTPCGSNSSECSTKHQLESRKESMGFEELSKRGVVTMLQSQGLIEDNKNETCRVLDINPQVEETDSRLCVRTVEMGTSIQAPYSLTTQNEKYFENSAETDIPKITKKLSQLGESELFASSGSFSLQSSIPVWETETGHGIMEEPELTLISTTDTSIAEMDFANLTLEEKSENEAKCFFQVSEFLPLVSATEASDYPAVSELSIEKPRTASTETPRRLTPVPGSLQEAFIKRKKSFMERSHQRQKEIRNKIHVSENSQIKTVKEKPSISSSVSRLKGVNKVRASFPEDRKTTQALRHQRGLRLYNQLAEVKQQKEEKTKQEAYAQNRARAKEFHKKTLEKLRAKNTC

SEQ ID NO: 2969 - protein, 125 aa, Homo sapiens
DHSRSSSSSASPSSPSSREEKESKKEREEEFKTHHEMKEYSGFAGVSRPRGTFHDDRDDGVDYWAKRGRGRGTFQRGRGRFNFKKSGSSPKWTHDKYQGDGIVEDEEETMENNEEKKDRRKEEKE

SEQ ID NO: 2970 - protein, 485 aa, Homo sapiens
MDNNKHCKQDNCLLTPNSGQEDADNDGVGDQCDDDADGDGIKNVEDNCRLFPNKDQQNSDTDSFGDACDNCPNVPNNDQKDTDGNGEGDACDNDVDGDGIPNGLDNCPKVPNPLQTDRDEDGVGDACDSCPEMSNPTQTDADSDLVGDVCDTNEDSDGDGHQDTKDNCPQLPNSSQLDSDNDGLGDECDGDDDNDGIPDYVPPGPDNCRLVPNPNQKDSDGNGVGDVCEDDFDNDAVVDPLDVCPESAEVTLTDFRAYQTVVLDPEGDAQIDPNWVVLNQGMEIVQTMNSDPGLAVGYTAFNGVDFEGTFHVNTVTDDDYAGFLFSYQDSGRFYVVMWKQTEQTYWQATPFRAVAQPGLQLKAVTSVSGPGEHLRNALWHTGHTPDQVRLLWTDPRNVGWRDKTSYRWQLLHRPQVGYIRVKLYEGPQLVADSGVIIDTSMRGGRLGVFCFSQENIIWSNLQYRCNDTVPEDFEPFRRQLLQGRV

SEQ ID NO: 2971 - protein, 450 aa, Homo sapiens
AGRSRASPVSGREGGSSRPLEEGTGSSPACVRGAAPGSQDAFYPTRAKQARVSQELKKAAKRTVSISEGPDTLGDGMRERRETLALAPEPEPLEKEACEKWKRPFRSASATSLTLSHCVDVVKGLLDFKKRRGHSIGGAPEQRYQIIPVCVAARLPTRAQDVLDAHLSEVNAVRFGPNSSLLATGGADRLIHLWNVVGSRLEANQTLEGAGGSITSVDFDPSGYQVLAATYNQAAQLWKVGEAQSKETLSGHKDKVTAAKFKLTRHQAVTGSRDRTVKEWDLGRAYCSRTINVLSYCNDVVCGDHIIISGHNDQKIRFWDSRGPHCTQVIPVQGRVTSLSLSHDQLHLLSCSRDNTLKVIDLRVSNIRQVFRADGFKCGSDWTKAVFSPDRSYALAGSCDGALYIWDVDTGKLESRLQGPHCAAVNAVAWCYSGSHMVSVDQGRKVVLWQ

SEQ ID NO: 2972 - protein, 354 aa, Homo sapiens
MASGLGSPSPCSAGSEEEDMDALLNNSLPPPHPENEEDPEEDLSETETPKLKKKKKPKKPRDPKIPKSKRQKKERMLLCRQLGDSSGEGPEFVEEEEEVALRSDSEGSDYTPGKKKKKKLGPKKEKKSKSKRKEEEEEEDDDDDSKEPKSSAQLLEDWGMEDIDHVFSEEDYRTLTNYKAFSQFVRPLIAAKNPKIAVSKMMMVLGAKWREFSTNNPFKGSSGASVAAAAAAAVAVVESMVTATEVAPPPPPVEVPIRKAKTKEGKGPNARRKPKGSPRVPDAKKPKPKKVAPLKIKLGGFGSKRKRSSSEDDDLDVESDFDDASINSYSVSDGSTSRSSRSRKKLRTTKKKKK

SEQ ID NO: 2973 - protein, 142 aa, Homo sapiens
MDTAAKAIILEQSGKNQGYRDADIRSFWPEGGVCLPGSPDVLESGVCMKAVCKRVAVEGVDVIFSRDAGRYVCDYTYYLSLHHGKGCAALIHVPPLSRGLPASLLGRALRVIIQEMLEEVGKPKHRAQFEENSTMVLPAKGN

SEQ ID NO: 2974 - protein, 681 aa, Homo sapiens
MPALPLDQLQITHKDPKTGKLRTSPALVIFDETLQKCLDSYLRYVPRKFDEGVASAPEVVDMQKRLHRSVFLTFLRMSTHKESKILDLCVLFGKGNSPLLQKMIGNIFTQQPSYYSDLDETLPTILQVFSNILQHCGLQGDGANTTPQKLEERGRLTPSDMPLLELKDIVLYLCDTCTTLWAFLDIFPLACQTFQKHDFCYRLASFYEAAIPEMESAIKKRRLEDSKLLGDLWQRLSHSRKKLMEIFHIILNQICLLPILESSCDNIQGFIEEFLQIFSSLLQEKRFLRDYDALFPVAEDISLLQQASSVLDETRTAYILQAVESAWEGVDRRKATDAKDPSVIEEPNGEPNGVTVTAEAVSQASSHPENSEEEECMGAAAAVGPAMCGVELDSLISQVKDLLPDLGEGFILACLEYYHYDPEQVINNILEERLAPTLSQLDRNLDREMKPDPTPLLTSRHNVFQNDEFDVFSRDSVDLSRVHKGKSTRKEENTRSLLNDKRAVAAQRQRYEQYSVVVEEVPLQPGESLPYHSVYYEDEYDDTYDGNQVGANDADSDDELISRRPFTIPQVLRTKVPREGQEEDDDDEEDDADEEAPKPDHFVQDPAVLREKAEARRMAFLAKKGYRHDSSTAVAGSPRGHGQSRETTQERRKKEANKATRANHNRRTMADRKRSKGMIPS

SEQ ID NO: 2975 - protein, 798 aa, Homo sapiens
MAISSRLALWEQKIREEDKSPPPSSPPPLFSVIPGGFIKQLVRGTEKEAKEARQRKQLAVASPEREIPEISISQPNSKSSSGTRSGSQQISQDDQSSSPGSSDILGKESEGSRSPDPEQMTSINGEKAQELGSSATPTKKTVPFKRGVRRGDVLLMVAKLDPDSAKPEKTHPHDAPPCKTSPPATDTGKEKKGETSRTPCGSQASTEILAPKAEKTRTGGLGDPGQGTVALKKGEEGQSIVGKGLGTPKTTELKEAEPQGKDRQGTRPQAQGPGEGVRPGKAEKEGAEPTNTVEKGNVSKDVGSEGKHVRPQIPGRKWGGFLGRRSKWDGPQNKKDKEGVLLSKAEKTGEPQTQMEKTSQVQGELGDDLRMGEKAGELRSTTGKAGESWDKKEKMGQPQGKSGNAGEARSQTEKGCEAPKEVSTMVESPAAPGKGGWPGSRGQEAEEPCSRAGDGAGALETELEGPSQPALEKDAERPRIRKENQDGPAPQEEGKGGQSRDSDQAPEDRWYEAEKVWLAQKDGFTLATVLKPDEGTADLPAGRVRLWIDADKTITEVDEEHVHRANPPELDQVEDLASLISVNESSVLNTLLQRYKAQLLHTCTGPDLIVLQPRGPSVPSAGKVPKGRRDGLPAHIGSMAQRAYWALLNQRRDQSIVALGWSGAGKTTCCEQVLEHLVGMAGSVDGRVSVEKIRATFTVLRAFGSVSMAHSRSATRFSMVMSLDFNATGRITAAQLQTMLLEKSRVARQPEGESNFLVFSQMLAGLDLDLRTELNLHQMADSSSFGMGVWSKWVGSSS

SEQ ID NO: 2976 - protein, 682 aa, Homo sapiens
MGPWGWKLRWTVALLLAAAGTAVGDRCERNEFQCQDGKCISYKWVCDGSAECQDGSDESQETCLSVTCKSGDFSCGGRVNRCIPQFWRCDGQVDCDNGSDEQGCPVATCRPDEFQCSDGNCIHGSRQCDREYDCKDMSDEVGCVNVTLCEGPNKFKCHSGECITLDKVCNMARDCRDWSDEPIKECGTNECLDNNGGCSHVCNDLKIGYECLCPDGFQLVAQRRCEDIDECQDPDTCSQLCVNLEGGYKCQCEEGFQLDPHTKACKAVGSIAYLFFTNRHEVRKMTLDRSEYTSLIPNLRNVVALDTEVASNRIYWSDLSQRMICSTQLDRAHGVSSYDTVISRDIQAPDGLAVDWIHSNIYWTDSVLGTVSVADTKGVKRKTLFRENGSKPRAIVVDPVHGFMYWTDWGTPAKIKKGGLNGVDIYSLVTENIQWPNGITLDLLSGRLYWVDSKLHSISSIDVNGGNRKTILEDEKRLAHPFSLAVFEDKVFWTDIINEAIFSANRLTGSDVNLLAENLLSPEDMVLFHNLTQPREAEAAVATQETSTVRLKVSSTAVRTQHTTTRPVPDTSRLPGATPGLTTVEIVTMSHQALGDVAGRGNEKKPSSVRALSIVLPIVLLVFLCLGVFLLWKNWRLKNINSINFDNPVYQKTTEDEVHICHNQDGYSYPSRQMVSLEDDVA

SEQ ID NO: 2977 - protein, 167 aa, Homo sapiens
MGADGFVPLGTLLQLPQFRGFSAEDVQRVVDTNRKQRFALQLGDPSTGLLIRANQGHSLQVPKLELMPLETPQALPPMLVHGTFWKHWPSILLKGLSCQGRTHIHLAPGLPGDPGIISGMRSHCEIAVFIDGPLALAGKPLSLAGDEETECQSSPKHSSRERRRIQQ

SEQ ID NO: 2978 - protein, 580 aa, Homo sapiens
MYATDSRGHSPAFLQPQNGNSRHPSGYVPGKVVPLRPPPPPKSQASAKFTSIRREDRATFAFSPEEQQAQRESQKQKRHKNTFICFAITSFSFFIALAIILGISSKYAPDENCPDQNPRLRNWDPGQDSAKQVVIKEGDMLRLTSDATVHSIVIQDGGLLVFGDNKDGSRNITLRTHYILIQDGGALHIGAEKCRYKSKATITLYGKSDEGESMPTFGKKFIGVEAGGTLELHGARKASWTLLARTLNSSGLPFGSYTFEKDFSRGLNVRVIDQDTAKILESERFDTHEYRNESRRLQEFLRFQDPGRIVAIAVGDSAAKSLLQGTIQMIQERLGSELIQGLGYRQAWALVGVIDGGSTSCNESVRNYENHSSGGKALAQREFYTVDGQKFSVTAYSEWIEGVSLSGFRVEVVDGVKLNLLDDVSSWKPGDQIVVASTDYSMYQAEEFTLLPCSECSHFQVKVKETPQFLHMGEIIDGVDMRAEVGILTRNIVIQGEVEDSCYAENQCQFFDYDTFGGHIMIMKNFTSVHLSYVELKHMGQQQMGRYPVHFHLCGDVDYKGGYRHATFVDGLSIHHSFSR

SEQ ID NO: 2979 - protein, 320 aa, Homo sapiens
MELCEFAFNMKKDEVCVNPYHYQRVETPVLPPVLVPRHTEIPAEFPPLDDYSHSIPENTNFPAGIEPQSNIPETPPPGYLSEDGETSDHQMNHSMDAGSPNLSPNPMSPAHNNLDLQPVTYCEPAFWCSISYYELNQRVGETFHASQPSMTVDGFTDPSNSERFCLGLLSNVNRNAAVELTRRHIGRGVRLYYIGGEVFAECLSDSAIFVQSPNCNQRYGWHPATVCKIPPGCNLKIFNNQEFAALLAQSVNQGFEAVYQLTRMCTIRMSFVKGWGAEYRRQTVTSTPCWIELHLNGPLQWLDKVLTQMGSPSIRCSSVS

SEQ ID NO: 2980 - protein, 1642 aa, Homo sapiens
MSSFKRGSLKSSTSGSQKGQKSWIEKTFCKRECIFVIPSMKDSNRCCCGQFTNQHIPPLPSATPSKNEEESKQVETQPEKWSVAKHTQSYPTDSYGVLEFQGGGYSNKAMYIRVSYDTKPDSLLHLMVKDWQLELPKLLISVHGGLQNFEMQPKLKQVFGKGLIKAAMTTGAWIFTGGVSTGVISHVGDALKDHSSKSRGRVCAIGIAPWGIVENKEDLVGKDVTRVYQTMSNPLSKLSVLNNSHTHFILADNGTLGKYGAEVKLRRLLEKHISLQKINTRLGQGVPLVGLVVEGGPNVVSIVLEYLQEEPPIPVVICDGSGRASDILSFAHKYCEEGGIINESLREQLLVTIQKTFNYNKAQSHQLFAIIMECMKKKELVTVFRMGSEGQQDIEMAILTALLKGTNVSAPDQLSLALAWNRVDIARSQIFVFGPHWPPLGSLAPPTDSKATEKEKKPPMATTKGGRGKGKGKKKGKVKEEVEEETDPRKIELLNWVNALEQAMLDALVLDRVDFVKLLIENGVNMQHFLTIPRLEELYNTRLGPPNTLHLLVRDVKKSNLPPDYHISLIDIGLVLEYLMGGAYRCNYTRKNFRTLYNNLFGPKRPKALKLLGMEDDEPPAKGKKKKKKKKEEEIDIDVDDPAVSRFQYPFHELMVWAVLMKRQKMAVFLWQRGEESMAKALVACKLYKAMAHESSESDLVDDISQDLDNNSKDFGQLALELLDQSYKHDEQIAMKLLTYELKNWSNSTCLKLAVAAKHRDFIAHTCSQMLLTDMWMGRLRMRKNPGLKVIMGILLPPTILFLEFRTYDDFSYQTSKENEDGKEKEEENTDANADAGSRKGDEENEHKKQRSIPIGTKICEFYNAPIVKFWFYTISYLGYLLLFNYVILVRMDGWPSLQEWIVISYIVSLALEKIREILMSEPGKLSQKIKVWLQEYWNITDLVAISTFMIGAILRLQNQPYMGYGRVIYCVDIIFWYIRVLDIFGVNKYLGPYVMMIGKMMIDMLYFVVIMLVVLMSFGVARQAILHPEEKPSWKLARNIFYMPYWMIYGEVFADQIDLYAMEINPPCGENLYDEEGKRLPPCIPGAWLTPALMACYLLVANILLVNLLIAVFNNTFFEVKSISNQVWKFQRYQLIMTFHDRPVLPPPMIILSHIYIIIMRLSGRCRKKREGDQEERDRGLKLFLSDEELKRLHEFEEQCVQEHFREKEDEQQSSSDERIRVTSERVENMSMRLEEINERETFMKTSLQTVDLRLAQLEELSNRMVNALENLAGIDRSDLIQARSRASSECEATYLLRQSSINSADGYSLYRYHFNGEELLFEDTSLSTSPGTGVRKKTCSFRIKEEKDVKTHLVPECQNSLHLSLGTSTSATPDGSHLAVDDLKNAEESKLGPDIGISKEDDERQTDSKKEETISPSLNKTDVIHGQDKSDVQNTQLTVETTNIEGTISYPLEETKITRYFPDETINACKTMKSRSFVYSRGRKLVGGVNQDVEYSSITDQQLTTEWQCQVQKITRSHSTDIPYIVSEAAVQAEHKEQFADMQDEHHVAEAIPRIPRLSLTITDRNGMENLLSVKPDQTLGFPSLRSKSLHGHPRNVKSIQGKLDRSGHASSVSSLVIVSGMTAEEKKVKKEKASTETEC

SEQ ID NO: 2981 - protein, 106 aa, Homo sapiens
EHSIKATLIWRLFFLIMFLTIIVCGMVAALSAIRANCHQEPSVCLQAACPESWIGFQRKCFYFSDDTKNWTSSQRFCDSQDADLAQVESFQELVSYPGSRRVCLFE

SEQ ID NO: 2982 - protein, 537 aa, Homo sapiens
MQVEKGATGISLSPHLPGELAICSRSGAVCLWSPEDGLRQIYRDPETLVFRDSSSWRWADFTAHPRVLTVGDRTGVKMLDTQGPPGCGLLLFRLGAEASCQKGERVLLTQYLGHSSPKCLPPTLHLVCTQFSLYLVDERLPLVPMLKWNHGLPSPLLLARLLPPPRPSCVQPLLLGGQGGQLQLLHLAGEGASVPRLAGPPQSLPSRIDSLPAFPLLEPKIQWRLQERLKAPTIGLAAVVPPLPSAPTPGLVLFQLSAAGDVFYQQLRPQVDSSLRRDAGPPGDTQPDCHAPTASWTSQDTAGCSQWLKALLKVPLAPPVWTAPTFTHRQMLGSTELRREEEEGQRLGVLRKAMARGQLLLQRDLGSLPAAEPPPAPESGLEDKLSERLGEAWAGRGAAWWERQQGRTSEPGRQTRRPKRRTQLSSSFSLSGHVDPSEDTSSPHSPEWPPADALPLPPTTPPSQELTPDACAQGVPSEQRQMLRDYMAKLPPQRDTPGCATTPPHSQASSVRATRSQQHTPVLSSSQPLRKKPRMGF

SEQ ID NO: 2983 - protein, 73 aa, Homo sapiens
AKQARVSQELKKAAKRTVSISEGPDTLGDGMRERRETLALAPEPEPLEKEACEKWKRPFSLSLQVPGVQALGQ

SEQ ID NO: 2984 - protein, 556 aa, Homo sapiens [sequence omitted]

SEQ ID NO: 2985 - protein, 1286 aa, Homo sapiens
MAEAGLRGWLLWALLLRLAQSEPYTTIHQPGYCAFYDECGKNPELSGSLMTLSNVSCLSNTPARKITGDHLILLQKICPRLYTGPNTQACCSAKQLVSLEASLSITKALLTRCPACSDNFVNLHCHNTCSPNQSLFINVTRVAQLGAGQLPAVVAYEAFYQHSFAEQSYDSCSRVRVPAAATLAVGTMCGVYGSALCNAQRWLNFQGDTGNGLAPLDITFHLLEPGQAVGSGIQPLNEGVARCNESQGDDVATCSCQDCAASCPAIARPQALDSTFYLGQMPGSLVLIIILCSVFAVVTILLVGFRVAPARDKSKMVDPKKGTSLSDKLSFSTHTLLGQFFQGWGTWVASWPLTILVLSVIPVVALAAGLVFTELTTDPVELWSAPNSQARSEKAFHDQHFGPFFRTNQVILTAPNRSSYRYDSLLLGPKNFSGILDLDLLLELLELQERLRHLQVWSPEAQRNISLQDICYAPLNPDNTSLYDCCINSLLQYFQNNRTLLLLTANQTLMGQTSQVDWKDHFLYCANAPLTFKDGTALALSCMADYGAPVFPFLAIGGYKGKDYSEAEALIMTFSLNNYPAGDPRLAQAKLWEEAFLEEMRAFQRRMAGMFQVTFMAERSLEDEINRTTAEDLPIFATSYIVIFLYISLALGSYSSWSRVMVDSKATLGLGGVAVVLGAVMAAMGFFSYLGIRSSLVILQVVPFLVLSVGADNIFIFVLEYQRLPRRPGEPREVHIGRALGRVAPSMLLCSLSEAICFFLGALTPMPAVRTFALTSGLAVILDFLLQMSAFVALLSLDSKRQEASRLDVCCCVKPQELPPPGQGEGLLLGFFQKAYAPFLLHWITRGVVVGAPVYFVTTLGYNFSSEAGMNAICSSAGCNNFSFTQKIQYATEFPEQSYLAIPASSWVDDFIDWLTPSSCCRLYISGPNKDKFCPSTVNSLNCLKNCMSITMGSVRPSVEQFHKYLPWFLNDRPNIKCPKGGLAAYSTSVNLTSDGQVLASRFMAYHKPLKNSQDYTEALRAARELAANITADLRKVPGTDPAFEVFPYTITNVFYEQYLTILPEGLFMLSLCLVPTFAVSCLLLGLDLRSGLLNLLSIVMILVDTVGFMALWGISYNAVSLINLVSAVGMSVEFVSHITRSFAISTKPTWLERAKEATISMGSAVFAGVAMTNLPGILVLGLAKAQLIQIFFFRLNLLITLLGLLHGLVFLPVILSYVGPDVNPALALEQKRAEEAVAAVMVASCPNHPSRVSTADNIYVNHSFEGSIKGAGAISNFLPNNGRQF

SEQ ID NO: 2986 - protein, 353 aa, Homo sapiens
MEEEGKKGKKPGIVSPFKRVFLKGEKSRDKKAHEKVTERRPLHTVVLSLPERVEPDRLLSDYIEKEVKYLGQLTSIPGYLNPSSRTEILHFIDNAKRAHQLPGHLTQEHDAVLSLSAYNVKLAWRDGEDIILRVPIHDIAAVSYVRDDAAHLVVLKTDDSSTKVDIKETYEVEASTFCFPESVDVGGASPHSKTISESELSASATELLQDYMLTLRTKLSSQEIQQFAALLHEYRNGASIHEFCINLRQLYGDSRKFLLLGLRPFIPEKDSQHFENFLETIGVKDGRGIITDSFGRHRRALSTTSSSTTNGNRATGSSDDRSAPSEGDEWDRMISDISSDIEALGCSMDQDSA

SEQ ID NO: 2987 - protein, 544 aa, Homo sapiens
MSGSRERDNMLHLHHSWTPNIDRLAEDGVKLTQHISAASLCTPSRAAFLTGRYPVRSGMVSSIGYRVLQWTGASGGLPTNETTFAKILKEKGYATGLIGKWHLGLNCESASDHCHHPLHHGFDHFYGMPFSLMGDCARWELSEKRVNLEQKLNFLFQVLALVALTLVAGKLTHLIPVSWMPVIWSALSAVLLLASSYFVGALIVHADCFLMRNHTITEQPMCFQRTTPLILQEVASFLKRNKHGPFLLFVSFLHVHIPLITMENFLGKSLHGLYGDNVEEMDWMVGRILDTLDVEGLSNSTLIYFTSDHGGSLENQLGNTQYGGWNGIYKGGKGMGGWEGGIRVPGIFRWPGVLPAGRVIGEPTSLMDVFPTVVRLAGGEVPQDRVIDGQDLLPLLLGTAQHSDHEFLMHYCERFLHAARWHQRDRGTMWKVHFVTPVFQPEGAGACYGRKVCPCFGEKVVHHDPPLLFDLSRDPSETHILTPASEPVFYQVMERVQQAVWEHQRTLSPVPLQLDRLGNIWRPWLQPCCGPFPLCWCLREDDPQ

SEQ ID NO: 2988 - protein, 560 aa, Homo sapiens
MASVFHYFLLVLVFLDTHAAQPFCLPGCTCSEESFGRTLQCTSVSLGKIPGNLSEEFKQVRIENSPLFEMPQGSFINMSTLEYLWLNFNNISVIHLGALEHLPELRELRLEGNKLCSVPWTAFRATPLLRVLDLKRNKIDALPELALQFLVSLTYLDLSSNRLTVVSKSVFLNWPAYQKCRQPDCGAEILSSLVVALHDNPWVCDCRLRGLVQFVKSITLPVILVNSYLICQGPLSKAGQLFHETELSACMKPQISTPSANITIRAGQNVTLRCLAQASPSPSIAWTYPLSMWREFDGLLGGKHLTPVLTSSTGEDTALSELAIPAAHLVDSGNYTCMASNSIGKSNLVISLHVQPAQALHAPDSLSIPSEGNAYIDLRVVKQTVHGILLEWLAVADTSKEEWFTLYIASDEAFRKEVVHIGPGINTYAVDDLLPGTKYEACLSLEGQPPHQGQCVAFVTGRDAGGLEAREHLLHVTVVLCVVLLAVPVGAYAWAAQGPCSCSKWVLRGCLHRRKAPSCTPAAPQSKDGSFREHPAVCDDGEGHIDTEGDKEKGGTEDNS

SEQ ID NO: 2989 - protein, 96 aa, Homo sapiens
MAATNLENQLHSAQKNLLFLQREHASTLKGLHSEIRRLQQHCTDLTYELTVKSSEQTGDGTSKSSELKKRCEELEAQLKVKENENAELLKELEQKN

SEQ ID NO: 2990 - protein, 412 aa, Homo sapiens
MGLSTVPDLLLPLVLLELLVGIYPSGVIGLVPHLGDREKRDSVCPQGKYIHPQNNSICCTKCHKEMGQVEISSCTVDRDTVCGCRKNQYRHYWSENLFQCFNCSLCLNGTVHLSCQEKQNTVCTCHAGFFLRENECVSCSNCKKSLECTKLCLPQIENVKGTEDSGTTVLLPLVIFFGLCLLSLLFIGLMYRYQRWKSKLYSIVCGKSTPEKEGELEGTTTKPLAPNPSFSPTPGFTPTLGFSPVPSSTFTSSSTYTPGDCPNFAAPRREVAPPYQGADPILATALASDPIPNPLQKWEDSAHKPQSLDTDDPATLYAVVENVPPLRWKEFVRRLGLSDHEIDRLELQNGRCLREAQYSMLATWRRRTPRREATLELLGRVLRDMDLLGCLEDIEEALCGPAALPPAPSLLR

SEQ ID NO: 2991 - protein, 95 aa, Homo sapiens
MGETEKRIETHRIRCLSKLKMFLLAITCAFVSKTLSGSYMNSMLTQIERQFNIPTSLVGFINGSFEIDMNMNLQFQFQATCPQTVSCVWKMEPRF

SEQ ID NO: 2992 - protein, 141 aa, Homo sapiens
MFRSDRMWSCHWKWKPSPLLFLFALYIMCVPHSAVWGCANCRVVLSNPSGTFTSPCYPNDYPNSQACMWTLRAPTGYIIQITFNDFDIEEAPNCIYDSLSLDNGESQTKFCGATAKGLSFNSSANEMHVSFSSDFSIQKKG

SEQ ID NO: 2993 - protein, 220 aa, Homo sapiens
MALIFRTAMQSVGLLLSLLGWILSIITTYLPHWKNLNLDLNEMENWTMGLWQTCVIQEEVGMQCKDFDSFLALPAELRVSRILMFLSNGLGFLGLLVSGFGLDCLRIGESQRDLKRRLLILGGILSWASGITALVPVSWVAHKTVQEFWDENVPDFVPRWEFGEALFLGWFAGLSLLLGGCLLNCAACSSHAPLALGHYAVAQMQTQCPYLEDGTADPQV

SEQ ID NO: 2994 - protein, 320 aa, Homo sapiens
RKGPAPAGRSRASPVSGREGGSSRPLEEGTGSSPACVRGAAPGSQDAFYPTRAKQARVSQELKKAAKRTVSISEGPDTLGDGMRERRETLALAPEPEPLEKEACEKWKRPFRSASATSLTLSHCVDVVKGLLDFKKRRGHSIGGAPEQRYQIIPVCVAARLPTRAQDVLDAHLSEVNAVRFGPNSSLLATGGADRLIHLWNVVGSRLEANQTLEGAGGSITSVDFDPSGYQVLAATYNQAAQLWKVGEAQSKETLSGHKDKVTAAKFKLTRHQAVTGSRDRTVKEWDLGRAYCSRTINVLSYCNDVVCGDHIIISGHNDQ

SEQ ID NO: 2995 - protein, 55 aa, Homo sapiens
MDDDDFGGFEAAETFDGGSGETQTTSPAIPWAAFPAGKHAIFIVSCLPEFMVELH

SEQ ID NO: 2996 - protein, 694 aa, Homo sapiens
MTFGQSKLYRSEDYGKNFKDITDLINNTFIRTEFGMAIGPENSGKVVLTAEVSGGSRGGRIFRSSDFAKNFVQTDLPFHPLTQMMYSPQNSDYLLALSTENGLWVSKNFGGKWEEIHKAVCLAKWGSDNTIFFTTYANGSCTDLGALELWRTSDLGKSFKTIGVKIYSFGLGGRFLFASVMADKDTTRRIHVSTDQGDTWSMAQLPSVGQEQFYSILAANDDMVFMHVDEPGDTGFGTIFTSDDRGIVYSKSLDRHLYTTTGGETDFTNVTSLRGVYITSVLSEDNSIQTMITFDQGGRWTHLRKPENSECDATAKNKNECSLHIHASYSISQKLNVPMAPLSEPNAVGIVIAHGSVGDAISVMVPDVYISDDGGYSWTKMLEGPHYYTILDSGGIIVAIEHSSRPINVIKFSTDEGQCWQTYTFTRDPIYFTGLASEPGARSMNISIWGFTESFLTSQWVSYTIDFKDILERNCEEKDYTIWLAHSTDPEDYEDGCILGYKEQFLRLRKSSVCQNGRDYVVTKQPSICLCSLEDFLCDFGYYRPENDSKCVEQPELKGHDLEFCLYGREEHLTTNGYRKIPGDKCQGGVNPVREVKDLKKKCTSNFLSPEKQNSKSNSVPIILAIVGLMLVTVVAGVLIVKKYVCGGRFLVHRYSVLQQHAEANGVDGVDALDTASHTNKSGYHDDSDEDLLE

SEQ ID NO: 2997 - protein, 216 aa, Homo sapiens
MNFSGGGRQEAAGSRGRRAPRPREQDRDVQLSKALSYALRHGALKLGLPMGADGFVPLGTLLQLPQFRGFSAEDVQRVVDTNRKQRFALQLGDPSTGLLIRANQGHSLQVPKLELMPLETPQALPPMLVHGTFWKHWPSILLKGLSCQGRTHIHLAPGLPGDPGIISGMRSHCEIAVFIDGPLALAGKPLSLAGDEETECQSSPKHSSRERRRIQQ

SEQ ID NO: 2998 - protein, 80 aa, Homo sapiens
MFLTIIVCGMVAALSAIRANCHQEPSVCLQAACPESWIGFQRKCFYFSDDTKNWTSSQRFCDSQDADLAQVESFQELVRK

SEQ ID NO: 2999 - protein, 692 aa, Homo sapiens
MSSIKGNKLEEQDPRPLQPIPGLMEGNKLEEQDSSPPQSTPGLMKGNKREEQGLGPEPAAPQQPTAEEEALIEFHRSYRELFEFFCNNTTIHGAIRLVCSQHNRMKTAFWAVLWLCTFGMMYWQFGLLFGEYFSYPVSLNINLNSDKLVFPAVTICTLNPYRYPEIKEELEELDRITEQTLFDLYKYSSFTTLVAGSRSRRDLRGTLPHPLQRLRVPPPPHGARRARSVASSLRDNNPQVDWKDWKIGFQLCNQNKSDCFYQTYSSGVDAVREWYRFHYINILSRLPETLPSLEEDTLGNFIFACRFNQVSCNQANYSHFHHPMYGNCYTFNDKNNSNLWMSSMPGINNGLSLMLRAEQNDFIPLLSTVTGARVMVHGQDEPAFMDDGGFNLRPGVETSISMRKETLDRLGGDYGDCTKNGSDVPVENLYPSKYTQQVCIHSCFQESMIKECGCAYIFYPRPQNVEYCDYRKHSSWGYCYYKLQVDFSSDHLGCFTKCRKPCSVTSYQLSAGYSRWPSVTSQEWVFQMLSRQNNYTVNNKRNGVAKVNIFFKELNYKTNSESPSVTMVTLLSNLGSQWSLWFGSSVLSVVEMAELVFDLLVIMFLMLLRRFRSRYWSPGRGGRGAQEVASTLASSPPSHFCPHPMSLSLSQPGPAPSPALTAPPPAYATLGPRPSPGGSAGASSSTCPLGGP

SEQ ID NO: 3000 - protein, 486 aa, Homo sapiens
MAERKPNGGSGGASTSSSGTNLLFSSSATEFSFNVPFIPVTQASASPASLLLPGEDSTDVGEEDSFLGQTSIHTSAPQTFSYFSQVSSSSDPFGNIGQSPLTTAATSVGQSGFPKPLTALPFTTGSQDVSNAFSPSISKAQPGAPPSSLMGINSYLPSQPSSLPPSYFGNQPQGIPQPGYNPYRHTPGSSRANPYIAPPQLQQCQTPGPPAHPPPSGPPVQMYQMPPGSLPPVPSSVQSPAQQQVPARPGAPSVQVPSPFLLQNQYEPVQPHWFYCKEVEYKQLWMPFSVFDSLNLEEIYNSVQPDPESVVLGTDGGRYDVYLYDRIRKAAYWEEEPAEVRRCTWFYKGDTDSRFIPYTEEFSEKLEAEYKKAVTTNQWHRRLEFPSGETIVMHNPKVIVQFQPSSVPDEWGTTQDGQTRPRVVKRGIDDNLDEIPDGEMPQVDHLVFVVHGIGPVCDLRFRSIIECVDDLGWFLSNCCGHISRNL

SEQ ID NO: 3001 - protein, 335 aa, Homo sapiens
MPDRENTFVVKVEGPSEYIMETVDAQHVKAWVSDIQECLSPGPCPATSPRPMTLPLAPGTSFLTRENTDSLELSCLNHSESLPSQDLLLGPSESNDRLSQGAYGGLSDRPSASISPSSASIAASHFDSMELLPPELPPRIPIEEGPPTGTVHPLSAPYPPLDTPETATGSFLFQGEPEGGEGDQPLSGYPWFHGMLSRLKAAQLVLTGGTGSHGVFLVRQSETRRGEYVLTFNFQGKAKHLRLSLNEEGQCRVQHLWFQSIFDMLEHFRVHPIPLESGGSSDVVLVSYVPSSQRQQGREQAGSHAGVCEGDGCHPDASCTLMPFGASDCVTDHLP

SEQ ID NO: 3002 - protein, 638 aa, Homo sapiens
MVSKLSQLQTELLAALLESGLSKEALIQALGEPGPYLLAGEGPLDKGESCGGGRGELAELPNGLGETRGSEDETDDDGEDFTPPILKELENLSPEEAAHQKAVVETLLQEDPWRVAKMVKSYLQQHNIPQREVVDTTGLNQSHLSQHLNKGTPMKTQKRAALYTWYVRKQREVAQQFTHAGQGGLIEEPTGDELPTKKGRRNRFKWGPASQQILFQAYERQKNPSKEERETLVEECNRAECIQRGVSPSQAQGLGSNLVTEVRVYNWFANRRKEEAFRHKLAMDTYSGPPPGPGPGPALPAHSSPGLPPPALSPSKVHGVRYGQPATSETAEVPSSSGGPLVTVSTPLHQVSPTGLEPSHSLLSTEAKLVSAAGGPLPPVSTLTALHSLEQTSPGLNQQPQNLIMASLPGVMTIGPGEPASLGPTFTNTGASTLVIGLASTQAQSVPVINSMGSSLTTLQPVQFSQPLHPSYQQPLMPPVQSHVTQSPFMATMAQLQSPHALYSHKPEVAQYTHTGLLPQTMLITDTTNLSALASLTPTKQEAALLPQVFTSDTEASSESGLHTPASQATTLHVPSQDPASIQHLQPAHRLSASPTVSSSSLVLYQSSDSSNGQSHLLPSNHSVIETFISTQMASSSQ

SEQ ID NO: 3003 - protein, 93 aa, Homo sapiens
MRKGVLKDPEIADLFYKDDPEELFIGLHEIGHGSFGAVYFATNAHTSEVVAIKKMSYSGKQTHEKWQDILKEVKFLRQLKHPNTIEYKGCYLK

SEQ ID NO: 3004 - protein, 353 aa, Homo sapiens
MLCRLCWLVSYSLAVLLLGCLLFLRKAAKPAGDPTAHQPFWAPPTPRHSRCPPNHTVSSASLSLPSRHRLFLTYRHCRNFSILLEPSGCSKDTFLLLAIKSQPGHVERRAAIRSTWGRVGGWARGRQLKLVFLLGVAGSAPPAQLLAYESREFDDILQWDFTEDFFNLTLKELHLQRWVVAACPQAHFMLKGDDDVFVHVPNVLEFLDGWDPAQDLLVGDVIRQALPNRNTKVKYFIPPSMYRATHYPPYAGGGGYVMSRATVRRLQAIMEDAELFPIDDVFVGMCLRRLGLSPMHHAGFKTFGIRRPLDPLDPCLYRGLLLVHRLSPLEMWTMWALVTDEGLKCAAGPIPQR

SEQ ID NO: 3005 - protein, 245 aa, Homo sapiens
MLQACKMEGFPLVPPPSEDLVPYDTDLYQRQTHEYYPYLSSDGESHSDHYWDFHPHHVHSEFESFAENNFTELQSVQPPQLQQLYRHMELEQMHVLDTPMVPPHPSLGHQVSYLPRMCLQYPSLSPAQPSSDEEEGERQSPPLEVSDGEADGLEPGPGLLPGETGGAPGPPPWPRPWPCLCPAPTQPGQLTQQPRHRVACVCVCMFASVCVLWGCLWLSLCVCICCVVHTGISMKCARCVCLSVP

SEQ ID NO: 3006 - protein, 2789 aa, Homo sapiens
MRLGGGQLVSEELMNLGESFIQTNDPSLKLFQCAVCNKFTTDNLDMLGLHMNVERSLSEDEWKAVMGDSYQCKLCRYNTQLKANFQLHCKTDKHVQKYQLVAHIKEGGKANEWRLKCVAIGNPVHLKCNACDYYTNSLEKLRLHTVNSRHEASLKLYKHLQQHESGVEGESCYYHCVLCNYSTKAKLNLIQHVRSMKHQRSESLRKLQRLQKGLPEEDEDLGQIFTIRRCPSTDPEEAIEDVEGPSETAADPEELAKDQEGGASSSQAEKELTDSPATSKRISFPGSSESPLSSKRPKTAEEIKPEQMYQCPYCKYSNADVNRLRVHAMTQHSVQPMLRCPLCQDMLNNKIHLQLHLTHLHSVAPDCVEKLIMTVTTPEMVMPSSMFLPAAVPDRDGNSNLEEAGKQPETSEDLGKNILPSASTEQSGDLKPSPADPGSVREDSGFICWKKGCNQVFKTSAALQTHFNEVHAKRPQLPVSDRHVYKYRCNQCSLAFKTIEKLQLHSQYHVIRAATMCCLCQRSFRTFQALKKHLETSHLELSEADIQQLYGGLLANGDLLAMGDPTLAEDHTIIVEEDKEEESDLEDKQSPTGSDSGSVQEDSGSEPKRALPFRKGPNFTMEKFLDPSRPYKCTVCKESFTQKNILLVHYNSVSHLHKLKRALQESATGQPEPTSSPDNKPFKCNTCNVAYSQSSTLEIHMRSVLHQTKARAAKLEAASGSSNGTGNSSSISLSSSTPSPVSTSGSNTFTTSNPSSAGIAPSSNLLSQVPTESVGMPPLGNPIGANIASPSEPKEANRKKLADMIASRQQQQQQQQQQQQQQQQQQQAQTLAQAQAQVQAHLQQELQQQAALIQSQLFNPTLLPHFPMTTETLLQLQQQQHLLFPFYIPSAEFQLNPEVSLPVTSGALTLTGTGPGLLEDLKAQVQVPQQSHQQILPQQQQNQLSIAQSHSALLQPSQHPEKKNKLVIKEKEKESQRERDSAEGGEGNTGPKETLPDALKAKEKKELAPGGGSEPSMLPPRIASDARGNATKALLENFGFELVIQYNENKQKVQKKNGKTDQGENLEKLECDSCGKLFSNILILKSHQEHVHQNYFPFKQLERFAKQYRDHYDKLYPLRPQTPEPPPPPPPPPPPPLPAAPPQPASTPAIPASAPPITSPTIAPAQPSVPLTQLSMPMELPIFSPLMMQTMPLQTLPAQLPPQLGPVEPLPADLAQLYQHQLNPTLLQQQNKRPRTRITDDQLRVLRQYFDINNSPSEEQIKEMADKSGLPQKVIKHWFRNTLFKERQRNKDSPYNFSNPPITSLEELKIDSRPPSPEPPKQEYWGSKRSSRTRFTDYQLRVLQDFFDANAYPKDDEFEQLSNLLNLPTRVIVVWFQNARQKARKNYENQGEGKDGERRELTNDRYIRTSNLNYQCKKCSLVFQRIFDLIKHQKKLCYKDEDEEGQDDSQNEDSMDAMEILTPTSSSCSTPMPSQAYSAPAPSANNTASSAFLQLTAEAEELATFNSKTEAGDEKPKLAEAPSAQPNQTQEKQGQPKPELQQQEQPEQKTNTPQQKLPQLVSLPSLPQPPPQAPPPQCPLPQSSPSPSQLSHLPLKPLHTSTPQQLANLPPQLIPYQCDQCKLAFPSFEHWQEHQQLHFLSAQNQFIHPQFLDRSLDMPFMLFDPSNPLLASQLLSGAIPQIPASSATSPSTPTSTMNTLKRKLEEKASASPGENDSGTGGEEPQRDKRLRTTITPEQLEILYQKYLLDSNPTRKMLDHIAHEVGLKKRVVQVWFQNTRARERKGQFRAVGPAQAHRRCPFCRALFKAKTALEAHIRSRHWHEAKRAGYNLTLSAMLLDCDGGLQMKGDIFDGTSFSHLPPSSSDGQGVPLSPVSKTMELSPRTLLSPSSIKVEGIEDFESPSMSSVNLNFDQTKLDNDDCSSVNTAITDTTTGDEGNADNDSATGIATETKSSSAPNEGLTKAAMMAMSEYEDRLSSGLVSPAPSFYSKEYDNEGTVDYSETSSLADPCSPSPGASGSAGKSGDSGDRPGQKRFRTQMTNLQLKVLKSCFNDYRTPTMLECEVLGNDIGLPKRVVQVWFQNARAKEKKSKLSMAKHFGINQTSYEGPKTECTLCGIKYSARLSVRDHIFSQQHISKVKDTIGSQLDKEKEYFDPATVRQLMAQQELDRIKKANEVLGLAAQQQGMFDNTPLQALNLPTAYPALQGIPPVLLPGLNSPSLPGFTPSNTALTSPKPNLMGLPSTTVPSPGLPTSGLPNKPSSASLSSPTPAQATMAMGPQQPPQQQQQQQQPQVQQPPPPPAAQPPPTPQLPLQQQQQRKDKDSEKVKEKEKAHKGKGEPLPVPKKEKGEAPTATAATISAPLPTMEYAVDPAQLQALQAALTSDPTALLTSQFLPYFVPGFSPYYAPQIPGALQSGYLQPMYGMEGLFPYSPALSQALMGLSPGSLLQQYQQYQQSLQEAIQQQQQRQLQQQQQQKVQQQQPKASQTPVPPGAPSPDKDPAKESPKPEEQKNTPREVSPLLPKLPEEPEAESKSADSLYDPFIVPKVQYKLVCRKCQAGFSDEEAARSHLKSLCFFGQSVVNLQEMVLHVPTGGGGGGSGGGGGGGGGGGGGGSYHCLACESALCGEEALSQHLESALHKHRTITRAARNAKEHPSLLPHSACFPDPSTASTSQSAAHSNDSPPPPSAAAPSSASPHASRKSWPQVVSRASAAKPPSFPPLSSSSTVTSSSCSTSGVQPSMPTDDYSEESDTDLSQKSDGPASPVEGPKDPSCPKDSGLTSVGTDTFRL

SEQ ID NO: 3007 - protein, 905 aa, Homo sapiens
MTLTERLREKISRAFYNHGLLCASYPIPIILFGYFTLVPAIQEFCLFAVVGLVSDFFLQMLFFTTVLSIDIRRMELADLNKRLPPEACLPSAKPVGQPTRYERQLAVRPSTPHTITLQPSSFRNLRLPKRLRVVYFLARTRLAQRLIMAGTVVWIGILVYTDPAGLRNYLAAQVTEQSPLGEGALAPMPVPSGMLPPSHPDPAFSIFPPDAPKLPENQTSPGESPERGGPAEVVHDSPVPEVTWGPEDEELWRKLSFRHWPTLFSYYNITLAKRYISLLPVIPVTLRLNPREALEGRHPQDGRSAWPPPGPIPAGHWEAGPKGPGGVQAHGDVTLYKVAALGLATGIVLVLLLLCLYRVLCPRNYGQLGGGPGRRRRGELPCDDYGYAPPETEIVPLVLRGHLMDIECLASDGMLLVSCCLAGHVCVWDAQTGDCLTRIPRPGQRRDSGVGSGLEAQESWERLSDGGKAGPEEPGDSPPLRHRPRGPPPPSLFGDQPDLTCLIDTNFSAQPRSSQPTQPEPRHRAVCGRSRDSPGYDFSCLVQRVYQEEGLAAVCTPALRPPSPGPVLSQAPEDEGGSPEKGSPSLAWAPSAEGSIWSLELQGNLIVVGRSSGRLEVWDAIEGVLCCSSEEVSSGITALVFLDKRIVAARLNGSLDFFSLETHTALSPLQFRGTPGRGSSPASPVYSSSDTVACHLTHTVPCAHQKPITALKAAAGRLVTGSQDHTLRVFRLEDSCCLFTLQGHSGAITTVYIDQTMVLASGGQDGAICLWDVLTGSRVSHVFAHRGDVTSLTCTTSCVISSGLDDLISIWDRSTGIKFYSIQQDLGCGASLGVISDNLLVTGGQGCVSFWDLNYGDLLQTVYLGKNSEAQPARQILVLDNAAIVCNFGSELSLVYVPSVLEKLD

SEQ ID NO: 3008 - protein, 353 aa, Homo sapiens
MPTVDDILEQVGESGWFQKQAFLILCLLSAAFAPICVGIVFLGFTPDHHCQSPGVAELSQRCGWSPAEELNYTVPGLGPAGEAFLGQCRRYEVDWNQSALSCVDPLASLATNRSHLPLGPCQDGWVYDTPGSSIVTEFNLVCADSWKLDLFQSCLNAGFLFGSLGVGYFADRFGRKLCLLGTVLVNAVSGVLMAFSPNYMSMLLFRLLQGLVSKGNWMAGYTLITEFVGSGSRRTVAIMYQMAFTVGLVALTGLAYALPHWRWLQLAVSLPTFLFLLYYWCVPESPRWLLSQKRNTEAIKIMDHIAQKNGKLPPADLKMLSLEEDVTEKLSPSFADLFRTPRLRKRTFILMYL

SEQ ID NO: 3009 - protein, 919 aa, Homo sapiens
MEELTIWEQHTATLSKDPRRGFGIAISGGRDRPGGSMVVSDVVPGGPAEGRLQTGDHIVMVNGVSMENATSAFAIQILKTCTKMANITVKRPRRIHLPATKASPSSPGRQDSDEDDGPQRVEEVDQGRGYDGDSSSGSGRSWDERSRRPRPGRRGRAGSHGRRSPGGGSEANGLALVSGFKRLPRQDVQMKPVKSVLVKRRDSEEFGVKLGSQIFIKHITDSGLAARHRGLQEGDLILQINGVSSQNLSLNDTRRLIEKSEGKLSLLVLRDRGQFLVNIPPAVSDSDSSPLEDISDLASELSQAPPSHIPPPPRHAQRSPEASQTDSPVESPRLRRESSVDSRTISEPDEQRSELPRESSYDIYRVPSSQSMEDRGYSPDTRVVRFLKGKSIGLRLAGGNDVGIFVSGVQAGSPADGQGIQEGDQILQVNDVPFQNLTREEAVQFLLGLPPGEEMELVTQRKQDIFWKMVQSRVGDSFYIRTHFELEPSPPSGLGFTRGDVFHVLDTLHPGPGQSHARGGHWLAVRMGRDLREQERGIIPNQSRAEQLASLEAAQRAVGVGPGSSAGSNARAEFWRLRGLRRGAKKTTQRSREDLSALTRQGRYPPYERVVLREASFKRPVVILGPVADIAMQKLTAEMPDQFEIAETVSRTDSPSKIIKLDTVRVIAEKDKHALLDVTPSAIERLNYVQYYPIVVFFIPESRPALKALRQWLAPASRRSTRRLYAQAQKLRKHSSHLFTATIPLNGTSDTWYQELKAIIREQQTRPIWTAEDQLDGSLEDNLDLPHHGLADSSADLSCDSRVNSDYETDGEGGAYTDGEGYTDGEGGPYTDVDDEPPAPALARSSEPVQADESQSPRDRGRISAHQGAQVDSRHPQGQWRQDSMRTYEREALKKKFMRVHDAESSDEDGYDWGPATDL

SEQ ID NO: 3010 - protein, 300 aa, Homo sapiens
MTTLSPENSLSARQSASFILGLHPFVRTEAWKFLTGYFSWQSSQDERLTVDSMRRKNYKALCQMYEKIQPLLENLHRNFTETRNNIARDIQKIYDKDPLGNVLIDKKRLEKILLLSYVCNTQAEYQQGFHEMMMLFQLMVEHDHETFWLFQFFLQKTEHSCVINIGVAKNLDMLSTLITFLDPVFAEHLKGKGAGAVQSLFPWFCFCFQRAFKSFDDVWRLWEVLLTGKPCRNFQVLVAYSMLQMVREQVLQESMGGDDILLACNNLIDLDADELISAACVVYAELIQKDVPQTLKDFFL

SEQ ID NO: 3011 - protein, 783 aa, Homo sapiens
MDQREILQKFLDEAQSKKITKEEFANEFLKLKRQSTKYKADKTYPTTVAEKPKNIKKNRYKDILPYDYSRVELSLITSDEDSSYINANFIKGVYGPKAYIATQGPLSTTLLDFWRMIWEYSVLIIVMACMEYEMGKEAEKRKSDYIIRTLKVKFNSETRTIYQFHYKNWPDHDVPSSIDPILELIWDVRCYQEDDSVPICIHCSAGCGRTGVICAIDYTWMLLKDGIIPENFSVFSLIREMRTQRPSLVQTQEQYELVYNAVLELFKRQMDVIRDKHSGTESQAKHCIPEKNHTLQADSYSPNLPKSTTKAAKMMNQQRTKMEIKESSSFDFRTSEISAKEELVLHPAKSSTSFDFLELNYSFDKNADTTMKWQTKAFPIVGEPLQKHQSLDLGSLLFEGCSNSKPVNAAGRYFNSKVPITRTKSTPFELIQQRETKEVDSKENFSYLESQPHDSCFVEMQAQKVMHVSSAELNYSLPYDSKHQIRNASNVKHHDSSALGVYSYIPLVENPYFSSWPPSGTSSKMSLDLPEKQDGTVFPSSLLPTSSTSLFSYYNSHDSLSLNSPTNISSLLNQESAVLATAPRIDDEIPPPLPVWTPESFIVVEEAGEFSPNVPKSLSSAVKVKIGTSLEWGGTSEPKKFDDSVILRPSKSVKLRSPKSELHQDRSSPPPPLPERTLESFFLADEDCMQAQSIETYSTSYPDTMENSTSSKQTLKTPGKSFTRSKSLKILRNMKKSICNSCPPNKPAESVQSNNSSSFLNFGFANRFSKPKGPRNPPPTWNI

SEQ ID NO: 3012 - protein, 217 aa, Homo sapiens
TLVNNVRLPRGHRLELSDGDLLTFGPEGPPGTSPSEFYFMFQQVRVKPQDFAAITIPRSRGEARVGAGFRPMLPSQGAPQRPLSTFSPAPKATLILNSIGSLSKLRPQPLTFSPSWGGPKSLPVPAPPGEMGTTPSAPPQRNRRKSVHRVLAELDDESEPPENPPPVLMEPRKKLRVDKAPLTPTGNWHIQGMQSIVKGQKERPWPREHLSGYEEAS

SEQ ID NO: 3013 - protein, 667 aa, Homo sapiens
MGAAGLQGAPGGAEHPGRCGPGAVPRIRGSVVLAPRWRSSPAGGWSDPLFFGGAGISFSKPELITQLEQGKETWREEKKCSPATCPDPEPELYLDPFCPPGFSSQKFPMQHVLCNHPPWIFTCLCAEGNIQPGDPGPGDQEKQQQASEGRPWSDQAEGPEGEGAMPLFGRTKKRTLGAFSRPPQRQPVSSRNGLRGVELEASPAQSGNPEETDKLLKRIEVLGFGTVNCGECGLSFSKMTNLLSHQRIHSGEKPYVCGVCEKGFSLKKSLARHQKAHSGEKPIVCRECGRGFNRKSTLIIHERTHSGEKPYMCSECGRGFSQKSNLIIHQRTHSGEKPYVCRECGKGFSQKSAVVRHQRTHLEEKTIVCSDCGLGFSDRSNLISHQRTHSGEKPYACKECGRCFRQRTTLVNHQRTHSKEKPYVCGVCGHSFSQNSTLISHRRTHTGEKPYVCGVCGRGFSLKSHLNRHQNIHSGEKPIVCKDCGRGFSQQSNLIRHQRTHSGEKPMVCGECGRGFSQKSNLVAHQRTHSGERPYVCRECGRGFSHQAGLIRHKRKHSREKPYMCRQCGLGFGNKSALITHKRAHSEEKPCVCRECGQGFLQKSHLTLHQMTHTGEKPYVCKTCGRGFSLKSHLSRHRKTTSVHHRLPVQPDPEPCAGQPSDSLYSL

SEQ ID NO: 3014 - protein, 122 aa, Homo sapiens
MTSPHFSSYDEGPLDVSMAATNLENQLHSAQKNLLFLQREHASTLKGLHSEIRRLQQHCTDLTYELTVKSSEQTGDGTSKSSELKKRCEELEAQLKVKENENAELLKELEQKNAMITVLENT

SEQ ID NO: 3015 - protein, 282 aa, Homo sapiens
MRFARSKRGLRLKTVDSCFQDLKESRLVEDTFTIDEVSEVLNGLQAVVHSEVESELINTAYTNVLLLRQLFAQAEKWYLKLQTDISELENRELLEQVAEFEKAEITSSNKKPILDVTKPKLAPLNEGGTAELLNKEILRLQEENEKLKSRLKTIEIQATNALDEKSKLEKALQDLQLDQGNQKDFIKAQDLSNLENTVAALKSEFQKTLNDKTENQKSLEENLATAKHDLLRVQEQLHMAEKELEKKFQQTAAYRNMKEILTKKNDQIKDLRKRLAQYEPED

SEQ ID NO: 3016 - protein, 314 aa, Homo sapiens
MAATNLENQLHSAQKNLLFLQREHASTLKGLHSEIRRLQQHCTDLTYELTVKSSEQTGDGTSKSSELKKRCEELEAQLKVKENENAELLKELEQKNAMITVLENTIKEREKKYLEELKAKSHKLTLLSSELEQRASTIAYLTSQLHAAKKKLMSSSGTSDASPSGSPVLASYKPAPPKDKLPETPRRRMKKSLSAPLHPEFEEVYRFGAESRKLLLREPVDAMPDPTPFLLARESAEVHLIKERPLVIPPIASDRSGEQHSPAREKPHKAHVGVAHRIHHATPPQAQPEVKTLAVDQVNGGKVVRKHSGTDRTV

SEQ ID NO: 3017 - protein, 412 aa, Homo sapiens
MGCDRNCGLIAGAVIGAVLAVFGGILMPVGDLLIQKTIKKQVVLEEGTIAFKNWVKTGTEVYRQFWIFDVQNPQEVMMNSSNIQVKQRGPYTYRVRFLAKENVTQDAEDNTVSFLQPNGAIFEPSLSVGTEADNFTVLNLAVAYNNTADGVYKVFNGKDNISKVAIIDTYKGKRNLSYWESHCDMINGTDAASFPPFVEKSQVLQFFSSDICRSIYAVFESDVNLKGIPVYRFVLPSKAFASPVENPDNYCFCTEKIISKNCTSYGVLDISKCKEGRPVYISLPHFLYASPDVSEPIDGLNPNEEEHRTYLDIEPITGFTLQFAKRLQVNLLVKPSEKIQVLKNLKRNYIVPILWLNETGTIGDEKANMFRSQVTGKINLLGLIEMILLSVGVVMFVAFMISYCACRSKTIK

SEQ ID NO: 3018 - protein, 111 aa, Homo sapiens
MLVHGTFWKHWPSILLKGLSCQGRTHIHLAPGLPGDPGIISGMRSHCEIAVFIDGPLALAGNTDGFLLPKYFKEALQLRPTRKPLSLAGDEETECQSSPKHSSRERRRIQQ

SEQ ID NO: 3019 - protein, 1078 aa, Homo sapiens
MKKASRSVGSVPKVSAISKTQTAEKIKPENSSSASTGGKLVKPGTAASLSKTKSSDDLLAGMAGGVTVTNGVKGKKSTCPSAAPSASAPAMTTVENKSKISTGTASSTKRSTSTGNKESSSTRERLRERTRLNQSKKLPSAGQGANDMALAKRSRSRTATECDVRMSKSKSDNQISDRAALEAKVKDLLTLAKTKDVEILHLRNELRDMRAQLGINEDHSEGDEKSEKETIMAHQPTDVESTLLQLQEQNTAIREELNQLKNENRMLKDRLNALGFSLEQRLDNSEKLFGYQSLSPEITPGNQSDGGGTLTSSVEGSAPGSVEDLLSQDENTLMDHQHSNSMDNLDSECSEVYQPLTSSDDALDAPSSSESEGIPSIERSRKGSSGNASEVSVACLTERIHQMEENQHSTSEELQATLQELADLQQITQELNSENERLGEEKVILMESLCQQSDKLEHFSRQIEYFRSLLDEHHISYVIDEDVKSGRYMELEQRYMDLAENARFEREQLLGVQQHLSNTLKMAEQDNKEAQEMIGALKERSHHMERIIESEQKGKAALAATLEEYKATVASDQIEMNRLKAQLENEKQKVAELYSIHNSGDKSDIQDLLESVRLDKEKAETLASSLQEDLAHTRNDANRLQDAIAKVEDEYRAFQEEAKKQIEDLNMTLEKLRSDLDEKETERSDMKETIFELEDEVEQHRAVKLHDNLIISDLENTVKKLQDQKHDMEREIKTLHRRLREESAEWRQFQADLQTAVVIANDIKSEAQEEIGDLKRRLHEAQEKNEKLTKELEEIKSRKQEEERGRVYNYMNAVERDLAALRQGMGLSRRSSTSSEPTPTVKTLIKSFDSASQVPNPAAAAIPRTPLSPSPMKTPPAAAVSPMQRHSISGPISTSKPLTALSDKRPNYGEIPVQEHLLRTSSASRPASLPRVPAMESAKTLSVSRRSSEEVKRDISAQEGASPASLMAMGTTSPQLSLSSSPTASVTPTTRSRIREERKDPLSALAREYGGSKRNALLKWCQKKTEGYQRRNFMLAFQAAESVGIKSTLDINEMVRTERPDWQNVMLYVTAIYKYFET

SEQ ID NO: 3020 - protein, 452 aa, Homo sapiens
MVSKLSQLQTELLAALLESGLSKEALIQALGEPGPYLLAGEGPLDKGESCGGGRGELAELPNGLGETRGSEDETDDDGEDFTPPILKELENLSPEEAAHQKAVVETLLQEDPWRVAKMVKSYLQQHNIPQREVVDTTGLNQSHLSQHLNKGTPMKTQKRAALYTWYVRKQREVAQQFTHAGQGGLIEEPTGDELPTKKGRRNRFKWGPASQQTSPGLNQQPQNLIMASLPGVMTIGPGEPASLGPTFTNTGASTLVIGLASTQAQSVPVINSMGSSLTTLQPVQFSQPLHPSYQQPLMPPVQSHVTQSPFMATMAQLQSPHALYSHKPEVAQYTHTGLLPQTMLITDTTNLSALASLTPTKQVFTSDTEASSESGLHTPASQATTLHVPSQDPASIQHLQPAHRLSASPTVSSSSLVLYQSSDSSNGQSHLLPSNHSVIETFISTQMASSSQ

SEQ ID NO: 3021 - protein, 606 aa, Homo sapiens
MFGNECCFSTGEVIKITGLKVKKIIAEICEQIEGCESLQPFELPMNFPGLFKIVADKTPYLTMEEITRTIHIGPSRLGHPCFYHQKDIKLENLIIKQGEQIMLNSVEEIDGEIMVSCAVARNHQTHSFNLPLSQEGEFYECEDERIYTLKEIVEWKIPKNRTRTVNLTDFSNKWDSTNPFPKDFYGTLILKPVYEIQGVMKFRKDIIRILPSLDVEVKDITDSYDANWFLQLLSTEDLFEMTSKEFPIVTEVIEAPEGNHLPQSILQPGKTIVIHKKYQASRILASEIRSNFPKRHFLIPTSYKGKFKRRPREFPTAYDLEIAKSEKEPLHVVATKAFHSPHDKLSSVSVGDQFLVHQSETTEVLCEGIKKVVNVLACEKILKKSYEAALLPLYMEGGFVEVIHDKKQYPISELCKQFRLPFNVKVSVRDLSIEEDVLAATPGLQLEEDITDSYLLISDFANPTECWEIPVGRLNMTVQLVSNFSRDAEPFLVRTLVEEITEEQYYMMRRYESSASHPPPRPPKHPSVEETKLTLLTLAEERTVDLPKSPKRHHVDITKKLHPNQAGLDSKVLIGSQNDLVDEEKERSNRGATAIAETFKNEKHQK

SEQ ID NO: 3022 - protein, 445 aa, Homo sapiens
MSKLPRELTRDLERSLPAVASLGSSLSHSQSLSSHLLPPPEKRRAISDVRRTFCLFVTFDLLFISLLWIIELNTNTGIRKNLEQEIIQYNFKTSFFDIFVLAFFRFSGLLLGYAVLRLRHWSRRWCPVHSSLSRSSSLSCSAKGHLATCSPSSLLSSPGWRPGSLTSKSYPRKLKRSDSAPPGYLAAQVAVARGPLLFSGALSEGQFYSPPESFAGSDNESDEEVAGKKSFSAQEREYIRQGKEATAVVDQILAQEENWKFEKNNEYGDTVYTIEVPFHGKTFILKTFLPCPAELVYQEVILQPERMVLWNKTVTACQILQRVEDNTLISYDVSAGAAGGVVSPRDFVNVRRIERRRDRYLSSGIATSHSAKPPTHKYVRGENGPGGFIVLKSASNPRVCTFVWILNTDLKGRLPRYLIHQSLAATMFEFAFHLRQRISELGARA

SEQ ID NO: 3023 - protein, 106 aa, Homo sapiens
MAESLRSPRRSLYKLVGSPPWKEAFRQRCLERMRNSRDRLLNRYRQAGSSGPGNSQNSFLVQEVMEEEWNALQSVENCPEDLAQLEELIDMAVLEEIQQELINQGL

SEQ ID NO: 3024 - protein, 883 aa, Homo sapiens
MVVSDVVPGGPAEGRLQTGDHIVMVNGVSMENATSAFAIQILKTCTKMANITVKRPRRIHLPATKASPSSPGRQDSDEDDGPQRVEEVDQGRGYDGDSSSGSGRSWDERSRRPRPGRRGRAGSHGRRSPGGGSEANGLALVSGFKRLPRQDVQMKPVKSVLVKRRDSEEFGVKLGSQIFIKHITDSGLAARHRGLQEGDLILQINGVSSQNLSLNDTRRLIEKSEGKLSLLVLRDRGQFLVNIPPAVSDSDSSPLEDISDLASELSQAPPSHIPPPPRHAQRSPEASQTDSPVESPRLRRESSVDSRTISEPDEQRSELPRESSYDIYRVPSSQSMEDRGYSPDTRVVRFLKGKSIGLRLAGGNDVGIFVSGVQAGSPADGQGIQEGDQILQVNDVPFQNLTREEAVQFLLGLPPGEEMELVTQRKQDIFWKMVQSRVGDSFYIRTHFELEPSPPSGLGFTRGDVFHVLDTLHPGPGQSHARGGHWLAVRMGRDLREQERGIIPNQSRAEQLASLEAAQRAVGVGPGSSAGSNARAEFWRLRGLRRGAKKTTQRSREDLSALTRQGRYPPYERVVLREASFKRPVVILGPVADIAMQKLTAEMPDQFEIAETVSRTDSPSKIIKLDTVRVIAEKDKHALLDVTPSAIERLNYVQYYPIVVFFIPESRPALKALRQWLAPASRRSTRRLYAQAQKLRKHSSHLFTATIPLNGTSDTWYQELKAIIREQQTRPIWTAEDQLDGSLEDNLDLPHHGLADSSADLSCDSRVNSDYETDGEGGAYTDGEGYTDGEGGPYTDVDDEPPAPALARSSEPVQADESQSPRDRGRISAHQGAQVDSRHPQGQWRQDSMRTYEREALKKKFMRVHDAESSDEDGYDWGPATDL

SEQ ID NO: 3025 - protein, 278 aa, Homo sapiens
MWLFFGITGLLTAALSGHPSPAPPDQLNTSSAESELWEPGERLPVRLTNGSSSCSGTVEVRLEASWEPACGALWDSRAAEAVCRALGCGGAEAASQLAPPTPELPPPPAAGNTSVAANATLAGAPALLCSGAEWRLCEVVEHACRSDGRRARVTCAENRALRLVDGGGACAGRVEMLEHGEWGSVCDDTWDLEDAHVVCRQLGCGWAVQALPGLHFTPGRGPIHRDQVNCSGAEAYLWDCPGLPGQHYCGHKEDAGAVCSESSVTVKIENKESRELML

SEQ ID NO: 3026 - protein, 796 aa, Homo sapiens
MSADNQLQVIFITNDRRNKEKAIEEGIPAFTCEEYVKSLTANPELIDRLACLSEEGNEIESGKIIFSEHLPLSKLQQGIKSGTYLQGTFRASRENYLEATVWIHGDNEENKEIILQGLKHLNRAVHEDIVAVELLPKSQWVAPSSVVLHDEGQNEEDVEKEEETERMLKTAVSEKMLKPTGRVVGIIKRNWRPYCGMLSKSDIKESRRHLFTPADKRIPRIRIETRQASTLEGRRIIVAIDGWPRNSRYPNGHFVRNLGDVGEKETETEVLLLEHDVPHQPFSQAVLSFLPKMPWSITEKDMKNREDLRHLCICSVDPPGCTDIDDALHCRELENGNLEVGVHIADVSHFIRPGNALDQESARRGTTVYLCEKRIDMVPELLSSNLCSLKCDVDRLAFSCIWEMNHNAEILKTKFTKSVINSKASLTYAEAQLRIDSANMNDDITTSLRGLNKLAKILKKRRIEKGALTLSSPEVRFHMDSETHDPIDLQTKELRETNSMVEEFMLLANISVAKKIHEEFSEHALLRKHPAPPPSNYEILVKAARSRNLEIKTDTAKSLAESLDQAESPTFPYLNTLLRILATRCMMQAVYFCSGMDNDFHHYGLASPIYTHFTSPIRRYADVIVHRLLAVAIGADCTYPELTDKHKLADICKNLNFRHKMAQYAQRASVAFHTQLFFKSKGIVSEEAYILFVRKNAIVVLIPKYGLEGTVFFEEKDKPNPQLIYDDEIPSLKIEDTVFHVFDKVKVKIMLDSSNLQHQKIRMSLVEPQIPGISIPTDTSNMDLNGPKKKKMKLGK

SEQ ID NO: 3027 - protein, 421 aa, Homo sapiens
MGRPTQWPSLLLLLLLPGPPPVAGLEDAAFPHLGESLQPLPRACPLRCSCPRVDTVDCDGLDLRVFPDNITRAAQHLSLQNNQLQELPYNELSRLSGLRTLNLHNNLISSEGLPDEAFESLTQLQHLCVAHNKNNLISKVPRGALSRQTQLRELYLQHNQLTDSGLDATTFSKLHSLEYLDLSHNQLTTVPAGLPRTLAILHLGRNRIRQVEAARLHGARGLRYLLLQHNQLGSSGLPAGALRPLRGLHTLHLYGNGLDRVPPALPRRLRALVLPHNHVAALGARDLVATPGLTELNLAYNRLASARVHHRAFRRLRALRSLDLAGNQLTRLPMGLPTGLRTLQLQRNQLRMLEPEPLAGLDQLRELSLAHNRLRVGDIGPGTWHELQALQVRHRLVSHTVPRAPPSPCLPCHVPNILVSW

SEQ ID NO: 3028 - protein, 1008 aa, Homo sapiens
MKVVNLKQAILQAWKERWSDYQWAINMKKFFPKGATWDILNLADALLEQAMIGPSPNPLILSYLKYAISSQMVSYSSVLTAISKFDDFSRDLCVQALLDIMDMFCDRLSCHGKAEECIGLCRALLSALHWLLRCTAASAERLREGLEAGTPAAGEKQLAMCLQRLEKTLSSTKNRALLHIAKLEEASLHTSQGLGQGGTRANQPTASWTAIEHSLLKLGEILANLSNPQLRSQAEQCGTLIRSIPTMLSVHAEQMHKTGFPTVHAVILLEGTMNLTGETQSLVEQLTMVKRMQHIPTPLFVLEIWKACFVGLIESPEGTEELKWTAFTFLKIPQVLVKLKKYSHGDKDFTEDVNCAFEFLLKLTPLLDKADQRCNCDCTNFLLQECGKQGLLSEASVNNLMAKRKADREHAPQQKSGENANIQPNIQLILRAEPTVTNILKTMDADHSKSPEGLLGVLGHMLSGKSLDLLLAAAAATGKLKSFARKFINLNEFTTYGSEESTKPASVRALLFDISFLMLCHVAQTYGSEVILSESRTGAEVPFFETWMQTCMPEEGKILNPDHPCFRPDSTKVESLVALLNNSSEMKLVQMKWHEACLSISAAILEILNAWENGVLAFESIQKITDNIKGKVCSLAVCAVAWLVAHVRMLGLDEREKSLQMIRQLAGPLFSENTLQFYNERVVIMNSILERMCADVLQQTATQIKFPSTGVDTMPYWNLLPPKRPIKEVLTDIFAKVLEKGWVDSRSIHIFDTLLHMGGVYWFCNNLIKELLKETRKEHTLRAVELLYSIFCLDMQQVTLVLLGHILPGLLTDSSKWHSLMDPPGTALAKLAVWCALSSYSSHKGQASTRQKKRHREDIEDYISLFPLDDVQPSKLMRLLSSNEDDANILSSPTDRSMSSSLSASQLHTVNMRDPLNRVLANLFLLISSILGSRTAGPHTQFVQWFMEECVDCLEQGGRGSVLQFMPFTTVSELVKVSAMSSPKVVLAITDLSLPLGRQVAAKAIAAL

SEQ ID NO: 3029 - protein, 85 aa, Homo sapiens
MDDDDFGGFEAAETFDGGSGETQTTSPAIPWAAFPAVSGVHLSPSSPEIVLDRDHSSSIGCLSSDAIISSPENTHAANSIVSQTI

SEQ ID NO: 3030 - protein, 57 aa, Homo sapiens
MRKGVLKDPEIADLFYKDDPEELFIGLHEIGHGSFGAVYFATNAHTSEVVAIKKMSY

SEQ ID NO: 3031 - protein, 373 aa, Homo sapiens
MAEASRPRLSIPCSSITDVRTTTALEMPDRENTFVVKVEGPSEYIMETVDAQHVKAWVSDIQECLSPGPCPATSPRPMTLPLAPGTSFLTRENTDSLELSCLNHSESLPSQDLLLGPSESNDRLSQGAYGGLSDRPSASISPSSASIAASHFDSMELLPPELPPRIPIEEGPPTGTVHPLSAPYPPLDTPETATGSFLFQGEPEGGEGDQPLSGYPWFHGMLSRLKAAQLVLTGGTGSHGVFLVRQSETRRGEYVLTFNFQGKAKHLRLSLNEEGQCRVQHLWFQSIFDMLEHFRVHPIPLESGGSSDVVLVSYVPSSQRQQGEQSRSAGEEVPVHPRSEAGSRLGAMRGCAREMDATPMPPAPSCPSERVTV

SEQ ID NO: 3032 - protein, 247 aa, Homo sapiens
MVSKLSQLQTELLAALLESGLSKEALIQALGEPGPYLLAGEGPLDKGESCGGGRGELAELPNGLGETRGSEDETDDDGEDFTPPILKELENLSPEEAAHQKAVVETLLQEDPWRVAKMVKSYLQQHNIPQREVVDTTGLNQSHLSQHLNKGTPMKTQKRAALYTWYVRKQREVAQQFTHAGQGGLIEEPTGDELPTKKGRRNRFKWGPASQQILFQAYERQKNPSKEERETLVEECNRCALWTACDQ

SEQ ID NO: 3033 - protein, 1937 aa, Homo sapiens
MASGLGSPSPCSAGSEEEDMDALLNNSLPPPHPEDPEEDLSETETPKLKKKKKPKKPRDPKIPKSKRQKKERMLLCRQLGDSSGEGPEFVEEEEEVALRSDSEGSDYTPGKKKKKKLGPKKEKKSKSKRKEEEEEEDDDDDSKEPKSSAQLLEDWGMEDIDHVFSEEDYRTLTNYKAFSQFVRPLIAAKNPKIAVSKMMMVLGAKWREFSTNNPFKGSSGASVAAAAAAAVAVVESMVTATEVAPPPPPVEVPIRKAKTKEGKGPNARRKPKGSPRVPDAKKPKPKKVAPLKIKLGGFGSKRKRSSSEDDDLDVESDFDDASINSYSVSDGSTSRSSRSRKKLRTTKKKKKGEEEVTAVDGYETDHQDYCEVCQQGGEIILCDTCPRAYHMVCLDPDMEKAPEGKWSCPHCEKEGIQWEAKEDNSEGEEILEEVGGDLEEEDDHHMEFCRVCKDGGELLCCDTCPSSYHIHCLNPPLPEIPNGEWLCPRCTCPALKGKVQKILIWKWGQPPSPTPVPRPPDADPNTPSPKPLEGRPERQFFVKWQGMSYWHCSWVSELQLELHCQVMFRNYQRKNDMDEPPSGDFGGDEEKSRKRKNKDPKFAEMEERFYRYGIKPEWMMIHRILNHSVDKKGHVHYLIKWRDLPYDQASWESEDVEIQDYDLFKQSYWNHRELMRGEEGRPGKKLKKVKLRKLERPPETPTVDPTVKYERQPEYLDATGGTLHPYQMEGLNWLRFSWAQGTDTILADEMGLGKTVQTAVFLYSLYKEGHSKGPFLVSAPLSTIINWEREFEMWAPDMYVVTYVGDKDSRAIIRENEFSFEDNAIRGGKKASRMKKEASVKFHVLLTSYELITIDMAILGSIDWACLIVDEAHRLKNNQSKFFRVLNGYSLQHKLLLTGTPLQNNLEELFHLLNFLTPERFHNLEGFLEEFADIAKEDQIKKLHDMLGPHMLRRLKADVFKNMPSKTELIVRVELSPMQKKYYKYILTRNFEALNARGGGNQVSLLNVVMDLKKCCNHPYLFPVAAMEAPKMPNGMYDGSALIRASGKLLLLQKMLKNLKEGGHRVLIFSQMTKMLDLLEDFLEHEGYKYERIDGGITGNMRQEAIDRFNAPGAQQFCFLLSTRAGGLGINLATADTVIIYDSDWNPHNDIQAFSRAHRIGQNKKVMIYRFVTRASVEERITQVAKKKMMLTHLVVRPGLGSKTGSMSKQELDDILKFGTEELFKDEATDGGGDNKEGEDSSVIHYDDKAIERLLDRNQDETEDTELQGMNEYLSSFKVAQYVVREEEMGEEEEVEREIIKQEESVDPDYWEKLLRHHYEQQQEDLARNLGKGKRIRKQVNYNDGSQEDRGVCGRPRPPPMGRSTRAVGPAHLPSLPPDWQDDQSDNQSDYSVASEEGDEDFDERSEAPRRPSRKGLRNDKDKPLPPLLARVGGNIEVLGFNARQRKAFLNAIMRYGMPPQDAFTTQWLVRDLRGKSEKEFKAYVSLFMRHLCEPGADGAETFADGVPREGLSRQHVLTRIGVMSLIRKKVQEFEHVNGRWSMPELAEVEENKKMSQPGSPSPKTPTPSTPGDTQPNTPAPVPPAEDGIKIEENSLKEEESIEGEKEVKSTAPETAIECTQAPAPASEDEKVVVEPPEGEEKVEKAEVKERTEEPMETEPKGAADVEKVEEKSAIDLTPIVVEDKEEKKEEEEKKEVMLQNGETPKDLNDEKQKKNIKQRFMFNIADGGFTELHSLWQNEERAATVTKKTYEIWHRRHDYWLLAGIINHGYARWQDIQNDPRYAILNEPFKGEMNRGNFLEIKNKFLARRFKLLEQALVIEEQLRRAAYLNMSEDPSHPSMALNTRFAEVECLAESHQHLSKESMAGNKPANAVLHKVLKQLEELLSDMKADVTRLPATIARIPPVAVRLQMSERNILSRLANRAPEPTPQQVAQQQ

SEQ ID NO: 3034 - protein, 868 aa, Homo sapiens
MENVLAKALYDNVAESPDELSFRKGDIMTVLEQDTQGLDGWWLCSLHGRQGIVPGNRLKILVGMYDKKPAGPGPGPPATPAQPQPGLHAPAPPASQYTPMLPNTYQPQPDSVYLVPTPSKAQQGLYQVPGPSPQFQSPPAKQTSTFSKQTPHHPFPSPATDLYQVPPGPGGPAQDIYQVPPSAGMGHDIYQVPPSMDTRSWEGTKPPAKVVVPTRVGQGYVYEAAQPEQDEYDIPRHLLAPGPQDIYDVPPVRGLLPSQYGQEVYDTPPMAVKGPNGRDPLLEVYDVPPSVEKGLPPSNHHAVYDVPPSVSKDVPDGPLLREETYDVPPAFAKAKPFDPARTPLVLAAPPPDSPPAEDVYDVPPPAPDLYDVPPGLRRPGPGTLYDVPRERVLPPEVADGGVVDSGVYAVPPPAEREAPAEGKRLSASSTGSTRSSQSASSLEVAGPGREPLELEVAVEALARLQQGVSATVAHLLDLAGSAGATGSWRSPSEPQEPLVQDLQAAVAAVQSAVHELLEFARSAVGNAAHTSDRALHAKLSRQLQKMEDVHQTLVAHGQALDAGRGGSGATLEDLDRLVACSRAVPEDAKQLASFLHGNASLLFRRTKATAPGPEGGGTLHPNPTDKTSSIQSRPLPSPPKFTSQDSPDGQYENSEGGWMEDYDYVHLQGKEEFEKTQKELLEKGSITRQGKSQLELQQLKQFERLEQEVSRPIDHDLANWTPAQPLAPGRTGGLGPSDRQLLLFYLEQCEANLTTLTNAVDAFFTAVATNQPPKIFVAHSKFVILSAHKLVFIGDTLSRQAKAADVRSQVTHYSNLLCDLLRGIVATTKAAALQYPSPSAAQDMVERVKELGHSTQQFRRVLGQLAAA

SEQ ID NO: 3035 - protein, 191 aa, Homo sapiens
MFPFYSCWRTGLLLLLLAVAVRESWQTEEKTCDLVGEKGKESEKELALVKRLKPLFNKSFESTVGQGSDTYIYIFRVCREAGNHTSGAGLVQINKSNGKETVVGRLNETHIFNGSNWIMLIYKGGDEYDNHCGKEQRRAVVMISCNRHTLADGCDFVCRSKPRNVPAAYRGVGDDQLGEESEERDDHLLPM

SEQ ID NO: 3036 - protein, 744 aa, Homo sapiens
MEDCLHTSSENLSKLVSWAHSHGTICSLIPNLKHLLSEGSHGNLTAMWGCSAGHAYHWPLTATCRAGSQERVCFQDNRSFNSDSPSIIGVPSETQTSPVERYPGRPVKAKLDCNRTRDSCDFSYCSEPSELDETVEEYEDENTLFDMVCESSVTDEDSDFEPQTQRPQSIARKRPGVVPSSLHSSSQTQMVDECSNDVIIKKIKQEIPEDYYIVANAELTGGVDGPALSLTQMAKPKPQTHAGPSCVGSAKLIPHVTSAISTELDPHGMSASPSVISRPIVQKTARVSLASPNRGPPGTHGTNQQVAMQMPVSTSHPNKQISIPLSALQLPGQDEQVASEEFLSHLPSQVSSCEVALSPSVNTEPEVSSSQQQPPVAPAITTEATAQCIPDQDERAAELSREQNEKTIRSTQTALRNFPYSTKLNKFPVFNINDDLNDLCTSAVSPNTTKATRYALNVWRYWCMTNGLKDHTDITKIPAVKLNELLENFYVTVKKSDGSDFLATSLHAIRRGLDRILKNAGVGFSITSSTFSSSTKKLKEKLWVLSKAGMSGARSRNIVYFSLSDEEEMWQAGCLGDDSPITLLSTVVKYNSQYLNMRTLQEHADLMYGDIELLKDPQNQPYFARTDSVKRESRSGSTRVCHGKIYHEHSRGHKQCPYCLLYKYMYIHRPPTQMEAKSPFYLTARKEATDMGSVWYEEQRMGLRSLRGIVPNLAKKVKLENCENFTFVSFTQVSRRLGSHSCCQ

SEQ ID NO: 3037 - protein, 405 aa, Homo sapiens
MDDDDFGGFEAAETFDGGSGETQTTSPAIPWAAFPAVSGVHLSPSSPEIVLDRDHSSSIGCLSSDAIISSPENTHAANSIVSQTIPKAQIQQSTHTHLDISLFPLGLTDEKSNGTIALVDDSEDPGANVSNIQLQQKISSLEIKLKVSEEEKQRIKQDVESLMEKHNVLEKGFLKEKEQEAISFQDRYKELQEKHKQELEDMRKAGHEALSIIVDEYKHQRLLEMLDTEKELLKEKIKEALIQQSQEQKEILEKCLEEERQRNKEALVSAAKLEKEAVKDAVLKVVEEERKNLEKAHAEERELWKTEHAKDQEKVSQEIQKAIQEQRKISQETVKAAIIEEQKRSEKAVEEAVKRTRDELIEYIKEQKRLDQVIRQRSLSSLELFLSCAQKQLSALIATEPVDIE

SEQ ID NO: 3038 - protein, 819 aa, Homo sapiens
MGPWGWKLRWTVALLLAAAGTAVGDRCERNEFQCQDGKCISYKWVCDGSAECQDGSDESQETCSPKTCSQDEFRCHDGKCISRQFVCDSDRDCLDGSDEASCPVLTCGPASFQCNSSTCIPQLWACDNDPDCEDGSDEWPQRCRGLYVFQGDSSPCSAFEFHCLSGECIHSSWRCDGGPDCKDKSDEENCAVATCRPDEFQCSDGNCIHGSRQCDREYDCKDMSDEVGCVNVTLCEGPNKFKCHSGECITLDKVCNMARDCRDWSDEPIKECGTNECLDNNGGCSHVCNDLKIGYECLCPDGFQLVAQRRCEDIDECQDPDTCSQLCVNLEGGYKCQCEEGFQLDPHTKACKAVGSIAYLFFTNRHEVRKMTLDRSEYTSLIPNLRNVVALDTEVASNRIYWSDLSQRMICSTQLDRAHGVSSYDTVISRDIQAPDGLAVDWIHSNIYWTDSVLGTVSVADTKGVKRKTLFRENGSKPRAIVVDPVHGFMYWTDWGTPAKIKKGGLNGVDIYSLVTENIQWPNGITLDLLSGRLYWVDSKLHSISSIDVNGGNRKTILEDEKRLAHPFSLAVFEDKVFWTDIINEAIFSANRLTGSDVNLLAENLLSPEDMVLFHNLTQPRGVNWCERTTLSNGGCQYLCLPAPQINPHSPKFTCACPDGMLLARDMRSCLTEAEAAVATQETSTVRLKVSSTAVRTQHTTTRPVPDTSRLPGATPGLTTVEIVTMSHQALGDVAGRGNEKKPSSVRALSIVLPIVLLVFLCLGVFLLWKNWRLKNINSINFDNPVYQKTTEDEVHICHNQDGYSYPSRQMVSLEDDVA

SEQ ID NO: 3039 - protein, 372 aa, Homo sapiens
MYDGTKEVPMNPVKIYQVCDIPQPQGSIINPGSTGSAPWDEKDNDVDEEDEEDELDQSQHHVPIQDTFPFLNINGSPMAPASVGNCSVGNCSPEAVWPKTEPLEMEVPQAPIQPFYSSPELWISSLPMTDLDIKFQYRGKEYGQTMTVSNPQGCRLFYGDLGPMPDQEELFGPVSLEQVKFPGPEHITNEKQKLFTSKLLDVMDRGLILEVSGHAIYAIRLCQCKVYWSGPCAPSLVAPNLIERQKKVKLFCLETFLSDLIAHQKGQIEKQPPFEIYLCFGEEWPDGKPLERKLILVQVIPVVARMIYEMFSGDFTRSFDSGSVRLQISTPDIKDNIVAQLKQLYRILQTQESWQPMQPTPSMQLPPALPPQ

SEQ ID NO: 3040 - protein, 1912 aa, Homo sapiens
MASGLGSPSPCSAGSEEEDMDALLNNSLPPPHPENEEDPEEDLSETETPKLKKKKKPKKPRDPKIPKSKRQKKERMLLCRQLGDSSGEGPEFVEEEEEVALRSDSEGSDYTPGKKKKKKLGPKKEKKSKSKRKEEEEEEDDDDDSKEPKSSAQLLEDWGMEDIDHVFSEEDYRTLTNYKAFSQFVRPLIAAKNPKIAVSKMMMVLGAKWREFSTNNPFKGSSGASVAAAAAAAVAVVESMVTATEVAPPPPPVEVPIRKAKTKEGKGPNARRKPKGSPRVPDAKKPKPKKVAPLKIKLGGFGSKRKRSSSEDDDLDVESDFDDASINSYSVSDGSTSRSSRSRKKLRTTKKKKKGEEEVTAVDGYETDHQDYCEVCQQGGEIILCDTCPRAYHMVCLDPDMEKAPEGKWSCPHCEKEGIQWEAKEDNSEGEEILEEVGGDLEEEDDHHMEFCRVCKDGGELLCCDTCPSSYHIHCLNPPLPEIPNGEWLCPRCTCPALKGKVQKILIWKWGQPPSPTPVPRPPDADPNTPSPKPLEGRPERQFFVKWQGMSYWHCSWVSELQLELHCQVMFRNYQRKNDMDEPPSGDFGGDEEKSRKRKNKDPKFAEMEERFYRYGIKPEWMMIHRILNHSVDKKGHVHYLIKWRDLPYDQASWESEDVEIQDYDLFKQSYWNHRELMRGEEGRPGKKLKKVKLRKLERPPETPTVDPTVKYERQPEYLDATGGTLHPYQMEGLNWLRFSWAQGTDTILADEMGLGKTVQTAVFLYSLYKEGHSKGPFLVSAPLSTIINWEREFEMWAPDMYVVTYVGDKDSRAIIRENEFSFEDNAIRGGKKASRMKKEASVKFHVLLTSYELITIDMAILGSIDWACLIVDEAHRLKNNQSKFFRVLNGYSLQHKLLLTGTPLQNNLEELFHLLNFLTPERFHNLEGFLEEFADIAKEDQIKKLHDMLGPHMLRRLKADVFKNMPSKTELIVRVELSPMQKKYYKYILTRNFEALNARGGGNQVSLLNVVMDLKKCCNHPYLFPVAAMEAPKMPNGMYDGSALIRASGKLLLLQKMLKNLKEGGHRVLIFSQMTKMLDLLEDFLEHEGYKYERIDGGITGNMRQEAIDRFNAPGAQQFCFLLSTRAGGLGINLATADTVIIYDSDWNPHNDIQAFSRAHRIGQNKKVMIYRFVTRASVEERITQVAKKKMMLTHLVVRPGLGSKTGSMSKQELDDILKFGTEELFKDEATDGGGDNKEGEDSSVIHYDDKAIERLLDRNQDETEDTELQGMNEYLSSFKVAQYVVREEEMGEEEEVEREIIKQEESVDPDYWEKLLRHHYEQQQEDLARNLGKGKRIRKQVNYNDGSQEDRDWQDDQSDNQSDYSVASEEGDEDFDERSEAPRRPSRKGLRNDKDKPLPPLLARVGGNIEVLGFNARQRKAFLNAIMRYGMPPQDAFTTQWLVRDLRGKSEKEFKAYVSLFMRHLCEPGADGAETFADGVPREGLSRQHVLTRIGVMSLIRKKVQEFEHVNGRWSMPELAEVEENKKMSQPGSPSPKTPTPSTPGDTQPNTPAPVPPAEDGIKIEENSLKEEESIEGEKEVKSTAPETAIECTQAPAPASEDEKVVVEPPEGEEKVEKAEVKERTEEPMETEPKGAADVEKVEEKSAIDLTPIVVEDKEEKKEEEEKKEVMLQNGETPKDLNDEKQKKNIKQRFMFNIADGGFTELHSLWQNEERAATVTKKTYEIWHRRHDYWLLAGIINHGYARWQDIQNDPRYAILNEPFKGEMNRGNFLEIKNKFLARRFKLLEQALVIEEQLRRAAYLNMSEDPSHPSMALNTRFAEVECLAESHQHLSKESMAGNKPANAVLHKVLKQLEELLSDMKADVTRLPATIARIPPVAVRLQMSERNILSRLANRAPEPTPQQVAQQQ

SEQ ID NO: 3041 - protein, 248 aa, Homo sapiens
MAQAPADPGREGHLEQRILQVLTEAGSPVKLAQLVKECQAPKRELNQVLYRMKKELKVSLTSPATWCLGGTDPEGEGPAELALSSPAERPQQHAATIPETPGPQFSQQREEDIYRFLKDNGPQRALVIAQALGMRTAKDVNRDLYRMKSRHLLDMDEQSKAWTIYRPEDSGRRAKSASIIYQHNPINMICQNGPNSWISIANSEAIQIGHGNIITRQTVSREDGKSPKRAQGGDLGGEPPDPLGGGKG

SEQ ID NO: 3042 - protein, 373 aa, Homo sapiens
MGFPVLCRGWRRTWPGCASWLGAPPPQKPLLSPLLLNHRSSKSSRPKLQAACSSIQEVRWCTRLEMPDNLYTFVLKVKDRTDIIFEVGDEQQLNSWMAELSECTGRGLESTEAEMHIPSALEPSTSSSPRGSTDSLNQGASPGGLLDPACQKTDHFLSCYPWFHGPISRVKAAQLVQLQGPDAHGVFLVRQSETRRGEYVLTFNFQGIAKHLRLSLTERGQCRVQHLHFPSVVDMLHHFQRSPIPLECGAACDVRLSSYVVVVSQPPGSCNTVLFPFSLPHWDSESLPHWGSELGLPHLSSSGCPRGLSPEGLPGRSSPPEQIFHLVPSPEELANSLQHLEHEPVNRARDSDYEMDSSSRSHLRAIDNQYTPL

SEQ ID NO: 3043 - protein, 856 aa, Homo sapiens
MDEIKSQELNLEGQRKISPGSIKDSKTEASGNIAIRKSAKVIFALDETELKSKPEHTWKKNLFERMEARAQAMQQKIIDKENLKKELEKKAEKKLPRDNLAKEWFNTDSMTLNNTAYLLDKLLPTLVPGVENMLTQVEKKKVLTEADTPSKFDPINYLGEYLIRNNPNYIKDPGMSGYQRLMKEVTEDLKIYVPDTICNRVSKMKENVKQNRKQRESIDKIIVKVANTRKQALQEQFDEWILDPKGMIPKSVIQNVLQEFFQNPDFKLGSHCKQLDITDSTEPRLNKMEFTEYISSHIKDLKSEMFEELLKHLCHSADEFREVIKADMRRQMFAELFLHCDHGKVGFLDRQRTLALLELFYDHSSQMLRSLLRNPRQWPFIEFEEINLTELWGDMDNQKHIYEGFDKVLLEMNTLLSANHASKTQSKLLESPDQPKLNEQRTSTPSPNPPEQQRGVTAEQGPQRISIEEQQQGKKPTAEQELYIESVIEPGTHTESTLEQGSSRRLLTEQETHRESTTEQGQHKGSIEGQGPRRVSVSEQGSSRESVAEQGSRRESIAEQDRHKGSVAEQGSRRMSAAEQGSLRESVIEEPYQKSEQGPYGEIISEEQEDIGSTSQSRKDSILKSTKYGEPITSEYIEVPLQEKRSWEQTYEEEIFLSSELQEEVPTLSRKDHFPETTKKEVQKDKPCEPKSQKIEGKSWSGEFFTCNWKMKYVTFEDEEQANLIYGNSRFTDLHSIIRNIQSCKEVKGRTAFNGVSFNLLQFVQLLETFVGEDAPLSVSETLTSFFKEGYVETEQEKMNALEQVSLCRQAGVQWRNCSSLQPPTPGLKRSSHHRLLSNWDYRERRKFFPLETKFP

SEQ ID NO: 3044 - protein, 581 aa, Homo sapiens
MQYSHHCEHLLERLNKQREAGFLCDCTIVIGEFQFKAHRNVLASFSEYFGAIYRSTSENNVFLDQSQVKADGFQKLLEFIYTGTLNLDSWNVKEIHQAADYLKVEEVVTKCKIKMEDFAFIANPSSTEISSITGNIELNQQTCLLTLRDYNNREKSEVSTDLIQANPKQGALAKKSSQTKKKKKAFNSPKTGQNKTVQYPSDILENASVELFLDANKLPTPVVEQVAQINDNSELELTSVVENTFPAQDIVHTVTVKRKRGKSQPNCALKEHSMSNIASVKSPYEAENSGEELDQRYSKAKPMCNTCGKVFSEASSLRRHMRIHKGVKPYVCHLCGKAFTQCNQLKTHVRTHTGEKPYKCELCDKGFAQKCQLVFHSRMHHGEEKPYKCDVCNLQFATSSNLKIHARKHSGEKPYVCDRCGQRFAQASTLTYHVRRHTGEKPYVCDTCGKAFAVSSSLITHSRKHTGEKPYICGICGKSFISSGELNKHFRSHTGADKTLDSSAEDHTLSEQDSIQKSPLSETMDVKPSDMTLPLALPLGTEDHHMLLPVTDTQSPTSDTLLRSTVNGYSEPQLIFLQQLY

SEQ ID NO: 3045 - protein, 811 aa, Homo sapiens
TQKNKDALQPIKEDRTGKAQDDAFWLQSLITDAFHDKGFQKIKEYFQQKESHFPQKYNRLLLYRLDRSINKELDKNEFQSVSLLLKCIQRFLVDGLKEDEPLLIRQGLIPKLVSWFERTTGILTSEGLASDTSLICVIEDFFDTALIISRSSSEGKIQMLDSFLLSLGFLVTEKTVNHLLQQEGLKTFNCILHAVPREERKKFPLSEGMCHLMKDLARTLLTVGDYDQQVAISEALCRLTIKKSRDELVHKWFDDEVIAEAFKEIKDREFETDSRRFLNHLNNRLGDQRRVYSFPCIAAFADEHEMRKPADEKLEKFWIDFNLGSQSVTFYIDNAENTLWDSVTLPKEAVMNFSITETEKIKIFIIYLKKPMIISYKEVMKIEIHFDLQFNISQVSIQALGEDKQMLPDQTKISSELFSKSDKEDRESPSGLERETEQAEESTNMVEFMSAEDDRCLITLHLNDQSEPPVIGEPASDSHLQPVPPFGVPDFPQQPKSHYRKHLFSESNQDSSTSELSWTSNQKKKSLKSYSSRKKTRTRSNLRILPVFPPSSGSGHEKDQAKLLSPSEKEIPEQNNTTSPKTSEQKFQDSFAFLTAEDSAQKTELQDPHSLSELSSLKHSEDEEKPKIVNQESLTESTSLKHKLRNLEDKDIPEGSFAKSQQSRLEEEVAPGSPFSITEERELPEGISTSSLEVVPENLNGSAILPTFENFTKKRKRKYELRYRKRPFNSENAKKAPDCLIKLLNQMQLFRLNKLERFQNLVLQELSSLKQDIQALEHLEKEVLEFWGKQSADLQSFCDLQVLRFNSTQTS

SEQ ID NO: 3046 - protein, 206 aa, Homo sapiens
MILVCDRVSEDGINRQKAQEWCIKHGFELVELSPEELPEEDDDFPESTGVKRIVQALNANVWSNVVMKNDRNQGFSLLNSLTGTNHSIGSADPCHPEQPHLPAADSTESLSDHRGGASNTTDAQVDSIVDPMLDLDIQELASLTTGGGDVENFERLFSKLKEMKDKAATLPHEQRKVHAEKVAKAFWMAIGGDRDEIEGLSSDEEH

SEQ ID NO: 3047 - protein, 152 aa, Homo sapiens
ETTIKFAPANLGYARGVDPPPCDAGTDQDSRWRLQYDVYQYFLPENDLTEEMLLKHLQRMVSVPQVKASALKVVTLTANDKTSVSFSSLPGQGVIYNVIVWDPFLNTSAAYIPAHTYACSFEAGEGSCASLAVLYLLLCLSTSSPSFITGLF

SEQ ID NO: 3048 - protein, 444 aa, Homo sapiens
MGSPAHRPALLLLLPPLLLLLLLRVPPSRSFPDTPWCSPIKVKYGDVYCRAPQGGYYKTALGTRCDIRCQKGYELHGSSLLICQSNKRWSDKVICKQKRCPTLAMPANGGFKCVDGAYFNSRCEYYCSPGYTLKGERTVTCMDNKAWSGRPASCVDMEPPRIKCPSVKERIAEPNKLTVRVSWETPEGRDTADGILTDVILKGLPPGSNFPEGDHKIQYTVYDRAENKGTCKFRVKVRVKRCGKLNAPENGYMKCSSDGDNYGATCEFSCIGGYELQGSPARVCQSNLAWSGTEPTCAAMNVNVGVRTAAALLDQFYEKRRLLIVSTPTARNLLYRLQLGMLQQAQCGLDLRHITVVELVGVFPTLIGRIGAKIMPPALALQLRLLLRIPLYSFSMVLVDKHGMDKERYVSLVMPVALFNLIDTFPLRKEEMVLQAEMSQTCNT

SEQ ID NO: 3049 - protein, 821 aa, Homo sapiens
MVTNKMTAAFRNPSGKQVATDKVAEKLSSTLSWVKNTVSHTVSQMASQVASPSTSLHTTSSSTTLSTPALSPSSPSQLSPDDLELLAKLEEQNRLLETDSKSLRSVNGSRRNSGSSLVSSSSASSNLSHLEEDSWILWGRIVNEWEDVRKKKEKQVKELVHKGIPHHFRAIVWQLLCSAQSMPIKDQYSELLKMTSPCEKLIRRDIARTYPEHNFFKEKDSLGQEVLFNVMKAYSLVDREVGYCQGSAFIVGLLLMQMPEEEAFCVFVKLMQDYRLRELFKPSMAELGLCMYQFECMIQEHLPELFVHFQSQSFHTSMYASSWFLTIFLTTFPLPIATRIFDIFMSEGLEIVFRVGLALLQMNQAELMQLDMEGMLQHFQKVIPHQFDGVPDKLIQAAYQVKYNSKKMKKLEKEYTTIKTKEMEEQVEIKRLRTENRLLKQRIETLEKESASLADRLIQHKCSSNYNEDFVLQLEKELVQARLSEAESQCALKEMQDKVLDIEKRNNSLPDENNIARLQEELIAVKLREAEAIMGLKELRQQVKDLEEHWQRHLARTTGRWKDPPKKNAMNELQDELMTIRLREAETQAEIREIKQRMMEMETQNQINSNHLRRAEQEVISLQEKVQYLSAQNKGLLTQLSEAKRKQAEIECKNKEEVMAVRLREADSIAAVAELRQHIAELEIQKEEGKLQGQLNKSDSNQYIGELKDQIAELNHELRCLKGQRGFSGQPPFDGIHIVNHLIGDDESFHSSDEDFIDNSLQETGVGFPLHGKSGSMSLDPAVADGSESETEDSVLETRESNQVVQKERPPRRRESYSTTV

SEQ ID NO: 3050 - protein, 233 aa, Homo sapiens
MSSSGGAPGASASSAPPAQEEGMTWWYRWLCRLSGVLGAVSCAISGLFNCITIHPLNIAAGVWMIMNAFILLLCEAPFCCQFIEFANTVAEKVDRLRSWQKAVFYCGMAVVPIVISLTLTTLLGNAIAFATGVLYGLSALGKKAQTEAGSFAAQHPREPGPFSEGTRQAFATPAVVSGEIRMPAGAMRSPMPGSSSRGSRRMRRSSRRPWRGSCEGLGAPPSLSPLLALCGSK

SEQ ID NO: 3051 - protein, 1094 aa, Homo sapiens [sequence omitted]

SEQ ID NO: 3052 - protein, 109 aa, Homo sapiens
MFPFYSCWRTGLLLLLLAVAVRESWQTEEKTCDLVGEKGKESEKELALVKRLKPLFNKSFESTVGQGSDTYIYIFRVCREAGNHTSGAGLVQINKSNGKETVVGRLNET

SEQ ID NO: 3053 - protein, 1093 aa, Homo sapiens
MGGKAWPRRAVGTAGGPCAEQISAPFQTLLMPHLPLASFRPPFWGLRHSRGLPRFHSVSTQSEPHGSPISRRNREAKQKRLREKQATLEAEIAGESKSPAESIKAWRPKELVLYEIPTKPGEKKDVSGPLPPAYSPRYVEAAWYPWWVREGFFKPEYQARLPQATGETFSMCIPPPNVTGSLHIGHALTVAIQDALVRWHRMRGDQVLWVPGSDHAGIATQAVVEKQLWKERGVRRHELSREAFLREVWQWKEAKGGEICEQLRALGASLDWDRECFTMDVGSSVAVTEAFVRLYKAGLLYRNHQLVNWSCALRSAISDIEVENRPLPGHTQLRLPGCPTPVSFGLLFSVAFPVDGEPDAEVVVGTTRPETLPGDVAVAVHPDDSRYTHLHGRQLRHPLMGQPLPLITDYAVQPHVGTGAVKVTPAHSPADAEMGARHGLSPLNVIAEDGTMTSLCGDWLQGLHRFVAREKIMSVLSEWGLFRGLQNHPMVLPICSRSGDVIEYLLKNQWFVRCQEMGARAAKAVESGALELSPSFHQKNWQHWFSHIGDWCVSRQLWWGHQIPAYLVVEDHAQGEEDCWVVGRSEAEAREVAAELTGRPGAELTLERDPDVLDTWFSSALFPFSALGWPQETPDLARFYPLSLLETGSDLLLFWVGRMVMLGTQLTGQLPFSKVLLHPMVRDRQGRKMSKSLGNVLDPRDIISGVEMQVLQEKLRSGNLDPAELAIVAAAQKKDFPHGIPECGTDALRFTLCSHGVQAGDLHLSVSEVQSCRHFCNKIWNALRFILNALGEKFVPQPAEELSPSSPMDAWILSRLALAAQECERGFLTRELSLVTHALHHFWLHNLCDVYLEAVKPVLWHSPRPLGPPQVLFSCADLGLRLLAPLMPFLAEELWQRLPPRPGCPPAPSISVAPYPSACSLEHWRQPELERRFSRVQEVVQVLRALRATYQLTKARPRVLLQSSEPGDQGLFEAFLEPLGTLGYCGAVGLLPPGAAAPSGWAQAPLSDTAQVYMELQGLVDPQIQLPLLAARRYKLQKQLDSLTARTPSEGEAGTQRQQKLSSLQLELSKLDKAASHLRQLMDEPPAPGSPEL

SEQ ID NO: 3054 - protein, 86 aa, Homo sapiens
MAILLSYSERDPVPGGCNLEFDLDIDPNIYLEYNFFETTIKFAPANLGYARGVDPPPCDAGTDQDSRWRLQYDVYQYFLPENDLTE

SEQ ID NO: 3055 - protein, 92 aa, Homo sapiens
MFPFYSCWRTGLLLLLLAVAVRESWQTEEKTCDLVGEKGKESEKELALVKRLKPLFNKSFESTVGQGSDTYIYIFRVCREAGNHTSGAGLVQ

SEQ ID NO: 3056 - protein, 149 aa, Homo sapiens
MLRLRSGLRHLRATPNTRGSARLLCAEMPKKAGATTKGKSQSKEPERPLPPLGPVAVDPKGCVTIAIHAKPGSKQNAVTDLTAEAVNVAIAAPPSEGEANAELCRYLSKVLELRKSDVVLDKLCYSIPQQLEETQEGVSGIPDTPCHFL

SEQ ID NO: 3057 - protein, 519 aa, Homo sapiens
MQQFGGLEATGILDEATLALMKTPRCSLPDLPVLTQARRRRQAPAPTKWNKRNLSWRVRTFPRDSPLGHDTVRALMYYALKVWSDIAPLNFHEVAGSAADIQIDFSKADHNDGYPFDGPGGTVAHAFFPGHHHTAGDTHFDDDEAWTFRSSDAHGMDLFAVAVHEFGHAIGLSHVAAAHSIMRPYYQGPVGDPLRYGLPYEDKVRVWQLYGVRESVSPTAQPEEPPLLPEPPDNRSSAPPRKDVPHRCSTHFDAVAQIRGEAFFFKGKYFWRLTRDRHLVSLQPAQMHRFWRGLPLHLDSVDAVYERTSDHKIVFFKGDRYWVFKDNNVEEGYPRPVSDFSLPPGGIDAAFSWAHNDRTYFFKDQLYWRYDDHTRHMDPGYPAQSPLWRGVPSTLDDAMRWSDGASYFFRGQEYWKVLDGELEVAPGYPQSTARDWLVCGDSQADGSVAAGVDAAEGPRAPPGQHDQSRSEDGYEVCSCTSGASSPPGAPGPLVAATMLLLLPPLSPGALWTAAQALTL

SEQ ID NO: 3058 - protein, 97 aa, Homo sapiens
QARVSQELKKAAKRTVSISEGPDTLGDGMRERRETLALAPEPEPLEKEACEKWKRPFRGPHCTQVIPVQGRVTSLSLSHDQLHLLSCSRDNTLKVID

SEQ ID NO: 3059 - protein, 614 aa, Homo sapiens
MRPVINRCAPGSLDLMLPQAASEGIVFHSLQISLCFRSWLPAMLAVLLSLAPSASSDISASRPNILLLMADDLGIGDIGCYGNNTMRTPNIDRLAEDGVKLTQHISAASLCTPSRAAFLTGRYPVRSGMVSSIGYRVLQWTGASGGLPTNETTFAKILKEKGYATGLIGKWHLGLNCESASDHCHHPLHHGFDHFYGMPFSLMGDCARWELSEKRVNLEQKLNFLFQVLALVALTLVAGKLTHLIPVSWMPVIWSALSAVLLLASSYFVGALIVHADCFLMRNHTITEQPMCFQRTTPLILQEVASFLKRNKHGPFLLFVSFLHVHIPLITMENFLGKSLHGLYGDNVEEMDWMVGRILDTLDVEGLSNSTLIYFTSDHGGSLENQLGNTQYGGWNGIYKGGKGMGGWEGGIRVPGIFRWPGVLPAGRVIGEPTSLMDVFPTVVRLAGGEVPQDRVIDGQDLLPLLLGTAQHSDHEFLMHYCERFLHAARWHQRDRGTMWKVHFVTPVFQPEGAGACYGRKVCPCFGEKVVHHDPPLLFDLSRDPSETHILTPASEPVFYQVMERVQQAVWEHQRTLSPVPLQLDRLGNIWRPWLQPCCGPFPLCWCLREDDPQ

SEQ ID NO: 3060 - protein, 3426 aa, Homo sapiens
VLPSHTCGNPGEILKGVLHGTRFNIGDKIRYSCLPGYILEGHAILTCIVSPGNGASWDFPAPFCRAEGACGGTLRGTSSSISSPHFPSEYENNADCTWTILAEPGDTIALVFTDFQLEEGYDFLEISGTEAPSIWLTGMNLPSPVISSKNWLRLHFTSDSNHRRKGFNAQFQVKKAIELKSRGVKMLPSKDGSHKNSVLSQGGVALVSDMCPDPGIPENGRRAGSDFRVGANVQFSCEDNYVLQGSKSITCQRVTETLAAWSDHRPICRARTCGSNLRGPSGVITSPNYPVQYEDNAHCVWVITTTDPDKVIKLAFEEFELERGYDTLTVGDAGKVGDTRSVLYVLTGSSVPDLIVSMSNQMWLHLQSDDSIGSPGFKAVYQEIEKGGCGDPGIPAYGKRTGSSFLHGDTLTFECPAAFELVGERVITCQQNNQWSGNKPSCVFSCFFNFTASSGIILSPNYPEEYGNNMNCVWLIISEPGSRIHLIFNDFDVEPQFDFLAVKDDGISDITVLGTFSGNEVPSQLASSGHIVRLEFQSDHSTTGRGFNITYTTFGQNECHDPGIPINGRRFGDRFLLGSSVSFHCDDGFVKTQGSESITCILQDGNVVWSSTVPRCEAPCGGHLTASSGVILPPGWPGYYKDSLHCEWIIEAKPGHSIKITFDRFQTEVNYDTLEVRDGPASSSPLIGEYHGTQAPQFLISTGNFMYLLFTTDNSRSSIGFLIHYESVTLESDSCLDPGIPVNGHRHGGDFGIRSTVTFSCDPGYTLSDDEPLVCERNHQWNHALPSCDALCGGYIQGKSGTVLSPGFPDFYPNSLNCTWTIEVSHGKGVQMIFHTFHLESSHDYLLITEDGSFSEPVARLTGSVLPHTIKAGLFGNFTAQLRFISDFSISYEGFNITFSEYDLEPCDDPGVPAFSRRIGFHFGVGDSLTFSCFLGYRLEGATKLTCLGGGRRVWSAPLPRCVAECGASVKGNEGTLLSPNFPSNYDNNHECIYKIETEAGKGIHLRTRSFQLFEGDTLKVYDGKDSSSRPLGTFTKNELLGLILNSTSNHLWLEFNTNGSDTDQGFQLTYTSFDLVKCEDPGIPNYGYRIRDEGHFTDTVVLYSCNPGYAMHGSNTLTCLSGDRRVWDKPLPSCIAECGGQIHAATSGRILSPGYPAPYDNNLHCTWIIEADPGKTISLHFIVFDTEMAHDILKVWDGPVDSDILLKEWSGSALPEDIHSTFNSLTLQFDSDFFISKSGFSIQFSTSIAATCNDPGMPQNGTRYGDSREAGDTVTFQCDPGYQLQGQAKITCVQLNNRFFWQPDPPTCIAACGGNLTGPAGVILSPNYPQPYPPGKECDWRVKVNPDFVIALIFKSFNMEPSYDFLHIYEGEDSNSPLIGSYQGSQAPERIESSGNSLFLAFRSDASVGLSGFAIEFKEKPREACFDPGNIMNGTRVGTDFKLGSTITYQCDSGYKILDPSSITCVIGADGKPSWDQVLPSCNAPCGGQYTGSEGVVLSPNYPHNYTAGQICLYSITVPKEFVVFGQFAYFQTALNDLAELFDGTHAQARLLSSLSGSHSGETLPLATSNQILLRFSAKSGASARGFHFVYQAVPRTSDTQCSSVPEPRYGRRIGSEFSAGSIVRFECNPGYLLQGSTALHCQSVPNALAQWNDTIPSCVVPCSGNFTQRRGTILSPGYPEPYGNNLNCIWKIIVTEGSGIQIQVISFATEQNWDSLEIHDGGDVTAPRLGSFSGTTVPALLNSTSNQLYLHFQSDISVAAAGFHLEYKTVGLAACQEPALPSNSIKIGDRYMVNDVLSFQCEPGYTLQGRSHISCMPGTVRRWNYPSPLCIATCGGTLSTLGGVILSPGFPGSYPNNLDCTWRISLPIGYGAHIQFLNFSTEANHDFLEIQNGPYHTSPMIGQFSGTDLPAALLSTTHETLIHFYSDHSQNRQGFKLAYQAYELQNCPDPPPFQNGYMINSDYSVGQSVSFECYPGYILIGHPVLTCQHGINRNWNYPFPRCDAPCGYNVTSQNGTIYSPGFPDEYPILKDCIWLITVPPGHGVYINFTLLQTEAVNDYIAVWDGPDQNSPQLGVFSGNTALETAYSSTNQVLLKFHSDFSNGGFFVLNFHAFQLKKCQPPPAVPQAEMLTEDDDFEIGDFVKYQCHPGYTLVGTDILTCKLSSQLQFEGSLPTCEAQCPANEVRTGSSGVILSPGYPGNYFNSQTCSWSIKVEPNYNITIFVDTFQSEKQFDALEVFDGSSGQSPLLVVLSGNHTEQSNFTSRSNQLYLRWSTDHATSKKGFKIRYAAPYCSLTHPLKNGGILNRTAGAVGSKVHYFCKPGYRMVGHSNATCRRNPLGMYQWDSLTPLCQAVSCGIPESPGNGSFTGNEFTLDSKVVYECHEGFKLESSQQATAVCQEDGLWSNKGKPPTCKPVACPSIEAQLSEHVIWRLVSGSLNEYGAQVLLSCSPGYYLEGWRLLRCQANGTWNIGDERPSCRVISCGSLSFPPNGNKIGTLTVYGATAIFTCNTGYTLVGSHVRECLANGLWSGSETRCLAGHCGSPDPIVNGHISGDGFSYRDTVVYQCNPGFRLVGTSVRICLQDHKWSGQTPVCVPITCGHPGNPAHGFTNGSEFNLNDVVNFTCNTGYLLQGVSRAQCRSNGQWSSPLPTCRVVNCSDPGFVENAIRHGQQNFPESFEYGMSILYHCKKGFYLLGSSALTCMANGLWDRSLPKCLAISCGHPGVPANAVLTGELFTYGAVVHYSCRGSESLIGNDTRVCQEDSHWSGALPHCTGNNPGFCGDPGTPAHGSRLGDDFKTKSLLRFSCEMGHQLRGSPERTCLLNGSWSGLQPVCEAVSCGNPGTPTNGMIVSSDGILFSSSVIYACWEGYKTSGLMTRHCTANGTWTGTAPDCTIISCGDPGTLANGIQFGTDFTFNKTVSYQCNPGYVMEAVTSATIRCTKDGRWNPSKPVCKAVLCPQPPPVQNGTVEGSDFRWGSSISYSCMDGYQLSHSAILSCEGRGVWKGEIPQCLPVFCGDPGIPAEGRLSGKSFTYKSEVFFQCKSPFILVGSSRRVCQADGTWSGIQPTCIDPAHNTCPDPGTPHFGIQNSSRGYEVGSTVFFRCRKGYHIQGSTTRTCLANLTWSGIQTECIPHACRQPETPAHADVRAIDLPTFGYTLVYTCHPGFFLAGGSEHRTCKADMKWTGKSPVCKSKGVREVNETVTKTPVPSDVFFVNSLWKGYYEYLGKRQPATLTVDWFNATSSKVNATFSEASPVELKLTGIYKKEEAHLLLKAFQIKGQADIFVSKFENDNWGLDGYVSSGLERGGFTFQGDIHGKDFGKFKLERQDPLNPDQDSSSHYHGTSSGSVAAAILVPFFALILSGFAFYLYKHRTRPKVQYNGYAGHENSNGQASFENPMYDTNLKPTEAKAVRFDTTLNTVCTVV

SEQ ID NO: 3061 - protein, 611 aa, Homo sapiens
MLASLEKDKTAPGSAQVAGLCGRLTLHRDLRTGRWEPDPQRSRRCLRDPQRVLEYCRQMYPELQIARVEQATQAIPMERWCGGSRSGSCAHPHHQVVPFRCLPGEFVSEALLVPEGCRFLHQERMDQCESSTRRHQEAQEACSSQGLILHGSGMLLPCGSDRFRGVEYVCCPPPGTPDPSGTAVGDPSTRSWPPGSRVEGAEDEEEEESFPQPVDDYFVEPPQAEEEEETVPPPSSHTLAVVGKVTPTPRPTDGVDIYFGMPGEISEHEGFLRAKMDLEERRMRQINEVMREWAMADNQSKNLPKADRQALNEHFQSILQTLEEQVSGERQRLVETHATRVIALINDQRRAALEGFLAALQADPPQAERVLLALRRYLRAEQKEQRHTLRHYQHVAAVDPEKAQQMRFQVHTHLQVIEERVNQSLGLLDQNPHLAQELRPQIQELLHSEHLGPSELEAPAPGGSSEDKGGLQPPDSKDDTPMTLPKGSTEQDAASPEKEKMNPLEQYERKVNASVPRGFPFHSSEIQRDELAPAGTGVSREAVSGLLIMGAGGGSLIVLSMLLLRRKKPYGAISHGVVEVDPMLTLEEQQLRELQRHGYENPTYRFLEERP

SEQ ID NO: 3062 - protein, 957 aa, Homo sapiens
MEESSSVAMLVPDIGEQEAILTAESIISPSLEIDEQRKTKPDPLIHVIQKLSKIVENEKSQKCLLIGKKRPRSSAATHSLETQELCEIPAKVIQSPAADTRRAEMSQTNFTPDTLAQNEGKAMSYQCSLCKFLSSSFSVLKDHIKQHGQQNEVILMCSECHITSRSQEELEAHVVNDHDNDANIHTQSKAQQCVSPSSSLCRKTTERNETIPDIPVSVDNLQTHTVQTASVAEMGRRKWYAYEQYGMYRCLFCSYTCGQQRMLKTHAWKHAGEVDCSYPIFENENEPLGLLDSSAAAAPGGVDAVVIAIGESELSIHNGPSVQVQICSSEQLSSSSPLEQSAERGVHLSQSVTLDPNEEEMLEVISDAEENLIPDSLLTSAQKIISSSPNKKGHVNVIVERLPSAEETLSQKRFLMNTEMEEGKDLSLTEAQIGREGMDDVYRADKCTVDIGGLIIGWSSSEKKDELMNKGLATDENAPPGRRRTNSESLRLHSLAAEALVTMPIRAAELTRANLGHYGDINLLDPDTSQRQVDSTLAAYSKMMSPLKNSSDGLTSLNQSNSTLVALPEGRQELSDGQVKTGISMSLLTVIEKLRERTDQNASDDDILKELQDNAQCQPNSDTSLSGNNVVEYIPNAERPYRCRLCHYTSGNKGYIKQHLRVHRQRQPYQCPICEHIADNSKDLESHMIHHCKTRIYQCKQCEESFHYKSQLRNHEREQHSLPDTLSIATSNEPRISSDTADGKCVQEGNKSSVQKQYRCDVCDYTSTTYVGVRNHRRIHNSDKPYRKEFRCSLCGYVCSHPPSLKSHMWKHASDQNYNYEQVNKAINDAISQSGRVLGKSPGKTQLKSSEESADPVTGSSENAVSSSELMSQTPSEVLGTNENEKLSPTSNTSYSLEKISSLAPPSMEYCVLLFCCCICGFESTSKENLLDHMKEHEGEIVNIILNKDHNTALNTN

SEQ ID NO: 3063 - protein, 267 aa, Homo sapiens
MDDDDFGGFEAAETFDGGSGETQTTSPAIPWAAFPAVSGVHLSPSSPEIVLDRDHSSSIGCLSSDAIISSPENTHAANSIVSQTIPKAQIQQSTHTHLDISLFPLGLTDEKSNGTIALVDDSEDPGANVSNIQLQQKISSLEIKLKVSEEEKQRIKQDVESLMEKHNVLEKGFLKEKEQEAISFQDRYKELQEKHKQELEDMRKAGHEALSIIVDEYKALLQSSVKQQVEAIEKQYISAIEKQAHKCEELLNAQSALFSILPAIGCF

SEQ ID NO: 3064 - protein, 154 aa, Homo sapiens
MHDSNNVEKDITPSELPANPGCLHSKEHSIKATLIWRLFFLIMFLTIIVCGMVAALSAIRANCHQEPSVCLQAACPESWIGFQRKCFYFSDDTKNWTSSQRFCDSQDADLAQVESFQELNFLLRYKGPSDHWIGLSREQGQPWKWINGTEWTRQ

SEQ ID NO: 3065 - protein, 204 aa, Homo sapiens
MQKASHKNKKGDVLISVGHANVLGYTLREFLQLLQHITIGTVLQIKVYRDFINIPEEWQEIYDLIPEAKFPVTSTPKKIELAKDESFTSSDDNENVDLDKRLQYYRYPWSTVHHPARRPISISRDWHGYKKKNHTISVGKDINCDVMIHRDDKKEVRAPSPYWIMVKQDNESSSSSTSSTSDAFWLEDCAQVEEGKAQLVSKVG

SEQ ID NO: 3066 - protein, 1152 aa, Homo sapiens
MALRVLLLTALTLCHGFNLDTENAMTFQENARGFGQSVVQLQGSRVVVGAPQEIVAANQRGSLYQCDYSTGSCEPIRLQVPVEAVNMSLGLSLAATTSPPQLLACGPTVHQTCSENTYVKGLCFLFGSNLRQQPQKFPEALRGCPQEDSDIAFLIDGSGSIIPHDFRRMKEFVSTVMEQLKKSKTLFSLMQYSEEFRIHFTFKEFQNNPNPRSLVKPITQLLGRTHTATGIRKVVRELFNITNGARKNAFKILVVITDGEKFGDPLGYEDVIPEADREGVIRYVIGVGDAFRSEKSRQELNTIASKPPRDHVFQVNNFEALKTIQNQLREKIFAIEGTQTGSSSSFEHEMSQEGFSAAITSNGPLLSTVGSYDWAGGVFLYTSKEKSTFINMTRVDSDMNDAYLGYAAAIILRNRVQSLVLGAPRYQHIGLVAMFRQNTGMWESNANVKGTQIGAYFGASLCSVDVDSNGSTDLVLIGAPHYYEQTRGGQVSVCPLPRGRARWQCDAVLYGEQGQPWGRFGAALTVLGDVNGDKLTDVAIGAPGEEDNRGAVYLFHGTSGSGISPSHSQRIAGSKLSPRLQYFGQSLSGGQDLTMDGLVDLTVGAQGHVLLLRSQPVLRVKAIMEFNPREVARNVFECNDQVVKGKEAGEVRVCLHVQKSTRDRLREGQIQSVVTYDLALDSGRPHSRAVFNETKNSTRRQTQVLGLTQTCETLKLQLPNCIEDPVSPIVLRLNFSLVGTPLSAFGNLRPVLAEDAQRLFTALFPFEKNCGNDNICQDDLSITFSFMSLDCLVVGGPREFNVTVTVRNDGEDSYRTQVTFFFPLDLSYRKVSTLQNQRSQRSWRLACESASSTEVSGALKSTSCSINHPIFPENSEVTFNITFDVDSKASLGNKLLLKANVTSENNMPRTNKTEFQLELPVKYAVYMVVTSHGVSTKYLNFTASENTSRVMQHQYQVSNLGQRSLPISLVFLVPVRLNQTVIWDRPQVTFSENLSSTCHTKERLPSHSDFLAELRKAPVVNCSIAVCQRIQCDIPFFGIQEEFNATLKGNLSFDWYIKTSHNHLLIVSTAEILFNDSVFTLLPGQGAFVRSQTETKVEPFEVPNPLPLIVGSSVGGLLLLALITAALYKLGFFKRQYKDMMSEGGPPGAEPQ

SEQ ID NO: 3067 - protein, 115 aa, Homo sapiens
MQQFGGLEATGILDEATLALMKTPRCSLPDLPVLTQARRRRQAPAPTKWNKRNLSWRVRTFPRDSPLGHDTVRALMYYALKVWSDIAPLNFHEVAGSAADIQIDFSKADHNDGYP

SEQ ID NO: 3068 - protein, 396 aa, Homo sapiens
AAPGSQDAFYPTRAKQARVSQELKKAAKRTVSISEGPDTLGDGMRERRETLALAPEPEPLEKEACEKWKRPFSFKKRRGHSIGGAPEQRYQIIPVCVAARLPTRAQDVLDAHLSEVNAVRFGPNSSLLATGGADRLIHLWNVVGSRLEANQTLEGAGGSITSVDFDPSGYQVLAATYNQAAQLWKVGEAQSKETLSGHKDKVTAAKFKLTRHQAVTGSRDRTVKEWDLGRAYCSRTINVLSYCNDVVCGDHIIISGHNDQKIRFWDSRGPHCTQVIPVQGRVTSLSLSHDQLHLLSCSRDNTLKVIDLRVSNIRQVFRADGFKCGSDWTKAVFSPDRSYALAGSCDGALYIWDVDTGKLESRLQGPHCAAVNAVAWCYSGSHMVSVDQGRKVVLWQ

SEQ ID NO: 3069 - protein, 581 aa, Homo sapiens
MDTKDMNEFETEGFFALHQRRGAIKQAKVHHVKCHEFTATFFPQPTFCSVCHEFVWGLNKQGYQCRQCNAAIHKKCIDKVIAKCTGSAINSRETMFHKERFKIDMPHRFKVYNYKSPTFCEHCGTLLWGLARQGLKCDACGMNVHHRCQTKVANLCGINQKLMAEALAMIESTQQARCLRDTEQIFREGPVEIGLPCSIKNEARPPCLPTPGKREPQGISWESPLDEVDKMCHLPEPELNKERPSLQIKLKIEDFILHKMLGKGSFGKVFLAEFKKTNQFFAIKALKKDVVLMDDDVECTMVEKRVLSLAWEHPFLTHMFCTFQTKENLFFVMEYLNGGDLMYHIQSCHKFDLSRATFYAAEIILGLQFLHSKGIVYRDLKLDNILLDKDGHIKIADFGMCKENMLGDAKTNTFCGTPDYIAPEILLGQKYNHSVDWWSFGVLLYEMLIGQSPFHGQDEEELFHSIRMDNPFYPRWLEKEAKDLLVKLFVREPEKRLGVRGDIRQHPLFREINWEELERKEIDPPFRPKVKSPFDCSNFDKEFLNEKPRLSFADRALINSMDQNMFRNFSFMNPGMERLIS

SEQ ID NO: 3070 - protein, 256 aa, Homo sapiens
MRNQDPGKMGRQRKSIKLYPTHPLVTFPRSWAKFQEKALLVEDTFTIDEVSEVLNGLQAVVHSEVESELINTAYTNVLLLRQLFAQAEKWYLKLQTDISELENRELLEQVAEFEKAEITSSNKKPILDVTKPKLAPLNEGGTAELLNKEILRLQEENEKLKSRLKTIEIQATNALDEKSKLEKALQDLQLDQGNQKDFIKAQDLSNLENTVAALKSEFQKTLNDKTENQKSLEENLATAKHDLLRVQEQLHMAEKI

SEQ ID NO: 3071 - protein, 122 aa, Homo sapiens
MGLSTVPDLLLPLEPTCTMTVQARGRIRTAGSVRAAPSPLQKTTSDTASAAPNAERKWVRWRSLLAQWTGTPCVAAGRTSTGIIGVKTFSSASIAASASMGPCTSPARRNRTPCAPAMQVSF

SEQ ID NO: 3072 - protein, 5335 aa, Homo sapiens
MLVIWILTLALRLCASVTTVTPGSTVNTSIGGNTTSASTPSSSDPFTTFSDYGVSVTFITGSTATKHFLDSSTNSGHSEESTVSHSGPGATGTTLFPSHSATSVFVGEPKTSPITSASMETTALPGSTTTAGLSEKSTTFYSSPRSPDRTLSPARTTSSGVSEKSTTSHSRPGPTHTIAFPDSTTMPGVSQESTASHSIPGSTDTTLSPGTTTPSSLGPESTTFHSSPGYTKTTRLPDNTTTSGLLEASTPVHSSTGSPHTTLSPSSSTTHEGEPTTFQSWPSSKDTSPAPSGTTSAFVKLSTTYHSSPSSTPTTHFSASSTTLGHSEESTPVHSSPVATATTPPPARSATSGHVEESTAYHRSPGSTQTMHFPESSTTSGHSEESATFHGSTTHTKSSTPSTTAALAHTSYHSSLGSTETTHFRDSSTISGRSEESKASHSSPDAMATTVLPAGSTPSVLVGDSTPSPISSGSMETTALPGSTTKPGLSEKSTTFYSSPRSPDTTHLPASMTSSGVSEESTTSHSRPGSTHTTAFPGSTTMPGLSQESTASHSSPGPTDTTLSPGSTTASSLGPEYTTFHSRPGSTETTLLPDNTTASGLLEASMPVHSSTRSPHTTLSPAGSTTRQGESTTFHSWPSSKDTRPAPPTTTSAFVEPSTTSHGSPSSIPTTHISARSTTSGLVEESTTYHSSPGSTQTMHFPESDTTSGRGEESTTSHSSTTHTISSAPSTTSALVEEPTSYHSSPGSTATTHFPDSSTTSGRSEESTASHSSQDATGTIVLPARSTTSVLLGESTTSPISSGSMETTALPGSTTTPGLSERSTTFHSSPRSPATTLSPASTTSSGVSEESTTSRSRPGSTHTTAFPDSTTTPGLSRHSTTSHSSPGSTDTTLLPASTTTSGPSQESTTSHSSSGSTDTALSPGSTTALSFGQESTTFHSNPGSTHTTLFPDSTTSSGIVEASTRVHSSTGSPRTTLSPASSTSPGLQGESTAFQTHPASTHTTPSPPSTATAPVEESTTYHRSPGSTPTTHFPASSTTSGHSEKSTIFHSSPDASGTTPSSAHSTTSGRGESTTSRISPGSTEITTLPGSTTTPGLSEASTTFYSSPRSPTTTLSPASMTSLGVGEESTTSRSQPGSTHSTVSPASTTTPGLSEESTTVYSSSRGSTETTVFPHSTTTSVHGEEPTTFHSRPASTHTTLFTEDSTTSGLTEESTAFPGSPASTQTGLPATLTTADLGEESTTFPSSSGSTGTKLSPARSTTSGLVGESTPSRLSPSSTETTTLPGSPTTPSLSEKSTTFYTSPRSPDATLSPATTTSSGVSEESSTSHSQPGSTHTTAFPDSTTTSDLSQEPTTSHSSQGSTEATLSPGSTTASSLGQQSTTFHSSPGDTETTLLPDDTITSGLVEASTPTHSSTGSLHTTLTPASSTSAGLQEESTTFQSWPSSSDTTPSPPGTTAAPVEVSTTYHSRPSSTPTTHFSASSTTLGRSEESTTVHSSPGATGTALFPTRSATSVLVGEPTTSPISSGSTETTALPGSTTTAGLSEKSTTFYSSPRSPDTTLSPASTTSSGVSEESTTSHSRPGSTHTTAFPGSTTMPGVSQESTASHSSPGSTDTTLSPGSTTASSLGPESTTFHSSPGSTETTLLPDNTTASGLLEASTPVHSSTGSPHTTLSPAGSTTRQGESTTFQSWPSSKDTMPAPPTTTSAFVELSTTSHGSPSSTPTTHFSASSTTLGRSEESTTVHSSPVATATTPSPARSTTSGLVEESTAYHSSPGSTQTMHFPESSTASGRSEESRTSHSSTTHTISSPPSTTSALVEEPTSYHSSPGSTATTHFPDSSTTSGRSEESTASHSSQDATGTIVLPARSTTSVLLGESTTSPISSGSMETTALPGSTTTPGLSEKSTTFHSSPRSPATTLSPASTTSSGVSEESTTSHSRPGSTHTTAFPDSTTTPGLSRHSTTSHSSPGSTDTTLLPASTTTSGPSQESTTSHSSPGSTDTALSPGSTTALSFGQESTTFHSSPGSTHTTLFPDSTTSSGIVEASTRVHSSTGSPRTTLSPASSTSPGLQGESTAFQTHPASTHTTPSPPSTATAPVEESTTYHRSPGSTPTTHFPASSTTSGHSEKSTIFHSSPDASGTTPSSAHSTTSGRGESTTSRISPGSTEITTLPGSTTTPGLSEASTTFYSSPRSPTTTLSPASMTSLGVGEESTTSRSQPGSTHSTVSPASTTTPGLSEESTTVYSSSPGSTETTVFPRTPTTSVRGEEPTTFHSRPASTHTTLFTEDSTTSGLTEESTAFPGSPASTQTGLPATLTTADLGEESTTFPSSSGSTGTTLSPARSTTSGLVGESTPSRLSPSSTETTTLPGSPTTPSLSEKSTTFYTSPRSPDATLSPATTTSSGVSEESSTSHSQPGSTHTTAFPDSTTTPGLSRHSTTSHSSPGSTDTTLLPASTTTSGPSQESTTSHSSPGSTDTALSPGSTTALSFGQESTTFHSSPGSTHTTLFPDSTTSSGIVEASTRVHSSTGSPRTTLSPASSTSPGLQGESTTFQTHPASTHTTPSPPSTATAPVEESTTYHRSPGSTPTTHFPASSTTSGHSEKSTIFHSSPDASGTTPSSAHSTTSGRGESTTSRISPGSTEITTLPGSTTTPGLSEASTTFYSSPRSPTTTLSPASMTSLGVGEESTTSRSQPGSTHSTVSPASTTTPGLSEESTTVYSSSPGSTETTVFPRSTTTSVRGEEPTTFHSRPASTHTTLFTEDSTTSGLTEESTAFPGSPASTQTGLPATLTTADLGEESTTFPSSSGSTGTTLSPARSTTSGLVGESTPSRLSPSSTETTTLPGSPTTPSLSEKSTTFYTSPRSPDATLSPATTTSSGVSEESSTSHSQPGSTHTTAFPDSTTTSGLSQEPTASHSSQGSTEATLSPGSTTASSLGQQSTTFHSSPGDTETTLLPDDTITSGLVEASTPTHSSTGSLHTTLTPASSTSAGLQEESTTFQSWPSSSDTTPSPPGTTAAPVEVSTTYHSRPSSTPTTHFSASSTTLGRSEESTTVHSSPGATGTALFPTRSATSVLVGEPTTSPISSGSTETTALPGSTTTAGLSEKSTTFYSSPRSPDTTLSPASTTSSGVSEESTTSHSRPGSTHTTAFPGSTTMPGVSQESTASHSSPGSTDTTLSPGSTTASSLGPESTTFHSGPGSTETTLLPDNTTASGLLEASTPVHSSTGSPHTTLSPAGSTTRQGESTTFQSWPNSKDTTPAPPTTTSAFVELSTTSHGSPSSTPTTHFSASSTTLGRSEESTTVHSSPVATATTPSPARSTTSGLVEESTTYHSSPGSTQTMHFPESDTTSGRGEESTTSHSSTTHTISSAPSTTSALVEEPTSYHSSPGSTATTHFPDSSTTSGRSEESTASHSSQDATGTIVLPARSTTSVLLGESTTSPISSGSMETTALPGSTTTPGLSEKSTTFHSSPRSPATTLSPASTTSSGVSEESTTSHSRPGSTHTTAFPDSTTTPGLSRHSTTSHSSPGSTDTTLLPASTTTSGSSQESTTSHSSSGSTDTALSPGSTTALSFGQESTTFHSSPGSTHTTLFPDSTTSSGIVEASTRVHSSTGSPRTTLSPASSTSPGLQGESTAFQTHPASTHTTPSPPSTATAPVEESTTYHRSPGSTPTTHFPASSTTSGHSEKSTIFHSSPDASGTTPSSAHSTTSGRGESTTSRISPGSTEITTLPGSTTTPGLSEASTTFYSSPRSPTTTLSPASMTSLGVGEESTTSRSQPGSTHSTVSPASTTTPGLSEESTTVYSSSPGSTETTVFPRSTTTSVRREEPTTFHSRPASTHTTLFTEDSTTSGLTEESTAFPGSPASTQTGLPATLTTADLGEESTTFPSSSGSTGTKLSPARSTTSGLVGESTPSRLSPSSTETTTLPGSPTTPSLSEKSTTFYTSPRSPDATLSPATTTSSGVSEESSTSHSQPGSTHTTAFPDSTTTSGLSQEPTTSHSSQGSTEATLSPGSTTASSLGQQSTTFHSSPGDTETTLLPDDTITSGLVEASTPTHSSTGSLHTTLTPASSTSTGLQEESTTFQSWPSSSDTTPSPPSTTAVPVEVSTTYHSRPSSTPTTHFSASSTTLGRSEESTTVHSSPGATGTALFPTRSATSVLVGEPTTSPISSGSTETTALPGSTTTAGLSEKSTTFYSSPRSPDTTLSPASTTSSGVSEESTTSHSRPGSMHTTAFPSSTTMPGVSQESTASHSSPGSTDTTLSPGSTTASSLGPESTTFHSSPGSTETTLLPDNTTASGLLEASTPVHSSTGSPHTTLSPAGSTTRQGESTTFQSWPNSKDTTPAPPTTTSAFVELSTTSHGSPSSTPTTHFSASSTTLGRSEESTTVHSSPVATATTPSPARSTTSGLVEESTTYHSSPGSTQTMHFPESNTTSGRGEESTTSHSSTTHTISSAPSTTSALVEEPTSYHSSPGSTATTHFPDSSTTSGRSEESTASHSSQDATGTIVLPARSTTSVLLGESTTSPISSGSMETTALPGSTTTPGLSEKSTTFHSSPSSTPTTHFSASSTTLGRSEESTTVHSSPVATATTPSPARSTTSGLVEESTAYHSSPGSTQTMHFPESSTASGRSEESRTSHSSTTHTISSPPSTTSALVEEPTSYHSSPGSIATTHFPESSTTSGRSEESTASHSSPDTNGITPLPAHFTTSGRIAESTTFYISPGSMETTLASTATTPGLSAKSTILYSSSRSPDQTLSPASMTSSSISGEPTSLYSQAESTHTTAFPASTTTSGLSQESTTFHSKPGSTETTLSPGSITTSSFAQEFTTPHSQPGSALSTVSPASTTVPGLSEESTTFYSSPGSTETTAFSHSNTMSIHSQQSTPFPDSPGFTHTVLPATLTTTDIGQESTAFHSSSDATGTTPLPARSTASDLVGEPTTFYISPSPTYTTLFPASSSTSGLTEESTTFHTSPSFTSTIVSTESLETLAPGLCQEGQIWNGKQCVCPQGYVGYQCLSPLESFPVETPEKLNATLGMTVKVTYRNFTEKMNDASSQEYQNFSTLFKNRMDVVLKGDNLPQYRGVNIRRLLNGSIVVKNDVILEADYTLEYEELFENLAEIVKAKIMNETRTTLLDPDSCRKAILCYSEEDTFVDSSVTPGFDFQEQCTQKAAEGYTQFYYVDVLDGKLACVNKCTKGTKSQMNCNLGTCQLQRSGPRCLCPNTNTHWYWGETCEFNIAKSLVYGIVGAVMAVLLLALIILIILFSLSQRKRHREQYDVPQEWRKEGTPGIFQKTAIWEDQNLRESRFGLENAYNNFRPTLETVDSGTELHIQRPEMVASTV

SEQ ID NO: 3073 - protein, 2134 aa, Homo sapiens
MSGGAAEKQSSTPGSLFLSPPAPAPKNGSSSDSSVGEKLGAAAADAVTGRTEEYRRRRHTMDKDSRGAAATTTTTEHRFFRRSVICDSNATALELPGLPLSLPQPSIPAAVPQSAPPEPHREETVTATATSQVAQQPPAAAAPGEQAVAGPAPSTVPSSTSKDRPVSQPSLVGSKEEPPPARSGSGGGSAKEPQEERSQQQDDIEELETKAVGMSNDGRFLKFDIEIGRGSFKTVYKGLDTETTVEVAWCELQDRKLTKSERQRFKEEAEMLKGLQHPNIVRFYDSWESTVKGKKCIVLVTELMTSGTLKTYLKRFKVMKIKVLRSWCRQILKGLQFLHTRTPPIIHRDLKCDNIFITGPTGSVKIGDLGLATLKRASFAKSVIGTPEFMAPEMYEEKYDESVDVYAFGMCMLEMATSEYPYSECQNAAQIYRRVTSGVKPASFDKVAIPEVKEIIEGCIRQNKDERYSIKDLLNHAFFQEETGVRVELAEEDDGEKIAIKLWLRIEDIKKLKGKYKDNEAIEFSFDLERDVPEDVAQEMVESGYVCEGDHKTMAKAIKDRVSLIKRKREQRQLVREEQEKKKQEESSLKQQVEQSSASQTGIKQLPSASTGIPTASTTSASVSTQVEPEEPEADQHQQLQYQQPSISVLSDGTVDSGQGSSVFTESRVSSQQTVSYGSQHEQAHSTGTVPGHIPSTVQAQSQPHGVYPPSSVAQGQSQGQPSSSSLTGVSSSQPIQHPQQQGIQQTAPPQQTVQYSLSQTSTSSEATTAQPVSQPQAPQVLPQVSAGKQSTQGVSQVAPAEPVAVAQTQATQPTTLASSVDSAHSDVASGMSDGNENVPSSSGRHEGRTTKRHYRKSVRSRSRHEKTSRPKLRILNVSNKGDRVVECQLETHNRKMVTFKFDLDGDNPEEIATIMVNNDFILAIERESFVDQVREIIEKADEMLSEDVSVEPEGDQGLESLQGKDDYGFSGSQKLEGEFKQPIPASSMPQQIGIPTSSLTQVVHSAGRRFIVSPVPESRLRESKVFPSEITDTVAASTAQSPGMNLSHSASSLSLQQAFSELRRAQMTEGPNTAPPNFSHTGPTFPVVPPFLSSIAGVPTTAAATAPVPATSSPPNDISTSVIQSEVTVPTEEGIAGVATSTGVVTSGGLPIPPVSESPVLSSVVSSITIPAVVSISTTSPSLQVPTSTSEIVVSSTALYPSVTVSATSASAGGSTATPGPKPPAVVSQQAAGSTTVGATLTSVSTTTSFPSTASQLCIQLSSSTSTPTLAETVVVSAHSLDKTSHSSTTGLAFSLSAPSSSSSPGAGVSSYISQPGGLHPLVIPSVIASTPILPQAAGPTSTPLLPQVPSIPPLVQPVANVPAVQQTLIHSQPQPALLPNQPHTHCPEVDSDTQPKAPGIDDIKTLEEKLRSLFSEHSSSGAQHASVSLETSLVIESTVTPGIPTTAVAPSKLLTSTTSTCLPPTNLPLGTVALPVTPVVTPGQVSTPVSTTTSGVKPGTAPSKPPLTKAPVLPVGTELPAGTLPSEQLPPFPGPSLTQSQQPLEDLDAQLRRTLSPEMITVTSAVGPVSMAAPTAITEAGTQPQKVSQVKEGPVLATSSGAGVFKMGRFQVSVAADGAQKEGKNKSEDAKSVHFESSTSESSVLSSSSPESTLVKPEPNGITIPGISSDVPESAHKTTASEAKSDTGQPTKVGRFQVTTTANKVGRFSVSKTEDKITDTKKEGPVASPPFMDLEQAVLPAVIPKKEKPELSEPSHLNGPSSDPEAAFLSRDVDDGSGSPHSPHQLSSKSLPSQNLSQSLSNSFNSSYMSSDNESDIEDEDLKLELRRLRDKHLKEIQDLQSRQKHEIESLYTKLGKVPPAVIIPPAAPLSGRRRRPTKSKGSKSSRSSSLGNKSPQLSGNLSGQSAASVLHPQQTLHPPGNIPESGQNQLLQPLKPSPSSDNLYSAFTSDGAISVPSLSAPGQGTSSTNTVGATVNSQAAQAQPPAMTSSRKGTFTDDLHKLVDNWARDAMNLSGRRGSKGHMNYEGPGMARKFSAPGQLCISMTSNLGGSAPISAASATSLGHFTKSMCPPQQYGFPATPFGAQWSGTGGPAPQPLGQFQPVGTASLQNFNISNLQKSISNPPGSNLRTT

SEQ ID NO: 3074 - protein, 416 aa, Homo sapiens
AGRSRASPVSGREGGSSRPLEEGTGSSPACVRGAAPGSQDAFYPTRAKQARVSQELKKAAKRTVSISEGPDTLGDGMRERRETLALAPEPEPLEKEACEKWKRPFRSASATSLTLSHCVDVVKGLLDFKKRRGHSIGGAPEQRYQIIPVCVAARLPTRAQDVLDAHLSEVNAVRFGPNSSLLATGGADRLIHLWNVVGSRLEANQTLEGAGGSITSVDFDPSGYQVLAATYNQAAQLWKVGEAQSKETLSGHKDKVTAAKFKLTRHQAVTGSRDRTVKEWDLGRAYCSRTINVLSYCNDVVCGDHIIISGHNDQKIRFWDSRGPHCTQVIPVQGRVTSLSLSHDQLHLLSCSRDNTLKVIDLRVSNIRQVFRADGFKCGSDWTKAVFSAAVNAVAWCYSGSHMVSVDQGRKVVLWQ

SEQ ID NO: 3075 - protein, 298 aa, Homo sapiens
MGLSTVPDLLLPLVLLELLVGIYPSGVIGLVPHLGDREKRDSVCPQGKYIHPQNNSICCTKCHKGTYLYNDCPGPGQDTDCRECESGSFTASENHLRHCLSCSKCRKEMGQVEISSCTVDRDTVCGCRKNQYRHYWSENLFQCFNCSLCLNGTVHLSCQEKQNTVCTCHAGFFLRENECVSCSNCKKSLECTKLCLPQIENVKGTEDSGTTVLLPLVIFFGLCLLSLLFIGLMYRYQRWKSKLYSIGEWGLWEGEGAGGGEGGHGWVRWTCVEGGEECPLSSYRWGLWAEGGPGWLGR

SEQ ID NO: 3076 - protein, 191 aa, Homo sapiens
MNFSGGGRQEAAGSRGRRAPRPREQDRDVQLSKALSYALRHGALKLGLPMGADGFVPLGTLLQLPQFRGFSAEDVQRVVDTNRKQRFALQLGDPSTGLLIRANQGHSLQVGVPKLELMPLETPQALPPMLVHGTFWKHWPSILLKGLSCQGRTHIHLAPGLPGDPGIISGMRSHCEIAVFIDGPLALADGI

SEQ ID NO: 3077 - protein, 347 aa, Homo sapiens
MLMPDDFKAYSKIKVDNHLFNKENMPSHFKFKEYCPMVFRNLRERFGIDDQDFQNSLTRSAPLPNDSQARSGARFHTSYDKRYIIKTITSEDVAEMHNILKKYHQYIVECHGITLLPQFLGMYRLNVDGVEIYVIVTRNVFSHRLSVYRKYDLKGSTVAREASDKEKAKELPTLKDNDFINEGQKIYIDDNNKKVFLEKLKKDVEFLAQLKLMDYSLLVGIHDVERAEQEEVECEENDGEEEGESDGTHPVGTPPDSPGNTLNSSPPLAPGEFDPNIDVYGIKCHENSPRKEVYFMAIIDILTHYDAKKKAAHAAKTVKHGAGAEISTVNPEQYSKRFLDFIGHILT

SEQ ID NO: 3078 - protein, 133 aa, Homo sapiens
MFPFYSCWRTGLLLLLLAVAVRESWQTEEKTCDLVGEKGKESEKELALVKRLKPLFNKSFESTVGQGSDTYIYIFRVCREAGNHTSGAGLVQINKSNGKETVVGRLNETHIFNGSLHHWLLFMLLGGSYTSDW

SEQ ID NO: 3079 - protein, 302 aa, Homo sapiens
MYYALKVWSDIAPLNFHEVAGSAADIQIDFSKADHNDGYPFDGPGGTVAHAFFPGHHHTAGDTHFDDDEAWTFRSSDAHGMDLFAVAVHEFGHAIGLSHVAAAHSIMRPYYQGPVGDPLRYGLPYEDKVRVWQLYGVRESVSPTAQPEEPPLLPEPPDNRSSAPPRKDVPHRCSTHFDAVAQIRGEAFFFKGKYFWRLTRDRHLVSLQPAQMHRFWRGLPLHLDSVDAVYERTSDHKIVFFKGDRYWVFKDNNVEEGYPRPVSDFSLPPGGIDAAFSWAHNDRTYFFKDQLYWRYDDHTRHM

SEQ ID NO: 3080 - protein, 161 aa, Homo sapiens
ARTLRAFSTAVYSATPVPTPSLPERTPGNERPPRRKALPPRTEKMAVDQDWPSVYPVAAPFKPSAVPLPVRMGYPVKKGVPMAKEGNLELLKIPNFLHLTPVAIKKHCEALKDFCTEWPAALDSDEKCEKHFPIEIDSTDYVSSGPSVRNPRARVVVLREM

SEQ ID NO: 3081 - protein, 487 aa, Homo sapiens
MSNYSVSLVGPAPWGFRLQGGKDFNMPLTISSLKDGGKAAQANVRIGDVVLSIDGINAQGMTHLEAQNKIKGCTGSLNMTLQRASAAPKPEPVPVQKPTVTSVCSETSQELAEGQRRGSQGDSKQQNGPPRKHIVERYTEFYHVPTHSDASKKRLIEDTEDWRPRTGTTQSRSFRILAQITGTEHLKESEADNTKKANNSQEPSPQLASSVASTRSMPESLDSPTSGRPGVTSLTAAAAFKPVGSTGVIKSPSWQRPNQGVPSTGRISNSATYSGSVAPANSALGQTQPSDQDTLVQRAEHIPAGKRTPMCAHCNQVIRGPFLVALGKSWHPEEFNCAHCKNTMAYIGFVEEKGALYCELCYEKFFAPECGRCQRKILGEVISALKQTWHVSCFVCVACGKPIRNNVFHLEDGEPYCETDYYALFGTICHGCEFPIEAGDMFLEALGYTWHDTCFVCSVCCESLEGQTFFSKKDKPLCKKHAHSVNF

SEQ ID NO: 3082 - protein, 351 aa, Homo sapiens
MVLSQDGSVQSGFLAEGHLDGQPFLRYDRQKRRAKPQGQWAENVLGAKTWDTETEDLTENGQDLRRTLTHIKDQKGGLHSLQEIRVCEIHEDSSTRGSRHFYYDGELFLSQNLETQESTVPQSSRAQTLAMNVTNFWKEDAMKTKTHYRAMQADCLQKLQRYLKSGVAIRRTVPPMVNVTCSEVSEGNITVTCRASSFYPRNITLTWRQDGVSLSHNTQQWGDVLPDGNGTYQTWVATRIRQGEEQRFTCYMEHSGNHGTHPVPSGKALVLQSQRTDFPYVSAAMPCFVIIIILCVPCCKKKTSAAEGPELVSLQVLDQHPVGTGDHRDAAQLGFQPLMSATGSTGSTEGT

SEQ ID NO: 3083 - protein, 307 aa, Homo sapiens
MRLLVLLWGCLLLPGYEALEGPEEISGFEGDTVSLQCTYREELRDHRKYWCRKGGILFSRCSGTIYAEEEGQETMKGRVSIRDSRQELSLIVTLWNLTLQDAGEYWCGVEKRGPDESLLISLFVFPGPCCPPSPSPTFQPLATTRLQPKAKAQQTQPPGLTSPGLYPAATTAKQGKTGAEAPPLPGTSQYGHERTSQYTGTSPHPATSPPAGSSRPPMQLDSTSAEDTSPALSSGSSKPRVSIPMVRILAPVLVLLSLLSAAGLIAFCSHLLLWRKEAQQATETQRNEKFCLSRLNSLMFSLSLPWL

SEQ ID NO: 3084 - protein, 96 aa, Homo sapiens
MTSPHFSSYDEGPLDVSMAATNLENQLHSAQKNLLFLQREHASTLKGLHSEIRRLQQHCTDLTYELTVKSSEQTGDGTSKSSELKKRCEELEAQLK

SEQ ID NO: 3085 - protein, 713 aa, Homo sapiens
MPSTSFPVPSKFPLGPAAAVFGRGETLGPAPRAGGTMKSAEEEHYGYASSNVSPALPLPTAHSTLPAPCHNLQTSTPGIIPPADHPSGYGAALDGGPAGYFLSSGHTRPDGAPALESPRIEITSCLGLYHNNNQFFHDVEVEDVLPSSKRSPSTATLSLPSLEAYRDPSCLSPASSLSSRSCNSEASSYESNYSYPYASPQTSPWQSPCVSPKTTDPEEGFPRGLGACTLLGSPRHSPSTSPRASVTEESWLGARSSRPASPCNKRKYSLNGRQPPYSPHHSPTPSPHGSPRVSVTDDSWLGNTTQYTSSAIVAAINALTTDSSLDLGDGVPVKSRKTTLEQPPSVALKVEPVGEDLGSPPPPADFAPEDYSSFQHIRKGGFCDQYLAVPQHPYQWAKPKPLSPTSYMSPTLPALDWQLPSHSGPYELRIEVQPKSHHRAHYETEGSRGAVKASAGGHPIVQLHGYLENEPLMLQLFIGTADDRLLRPHAFYQVHRITGKTVSTTSHEAILSNTKVLEIPLLPENSMRAVIDCAGILKLRNSDIELRKGETDIGRKNTRVRLVFRVHVPQPSGRTLSLQVASNPIECSQRSAQELPLVEKQSTDSYPVVGGKKMVLSGHNFLQDSKVIFVEKAPDGHHVWEMEAKTDRDLCKPNSLVVEIPPFRNQRITSPVHVSFYVCNGKRKRSQYQRFTYLPANVNEIIRNDLSSTSTHS

SEQ ID NO: 3086 - protein, 275 aa, Homo sapiens
MPACCSCSDVFQYETNKVTRIQSMNYGTIKWFFHVIIFSYVCFALVSDKLYQRKEPVISSVHTKVKGIAEVKEEIVENGVKKLVHSVFDTADYTFPLQGNSFFVMTNFLKTEGQEQRLCPEYPTRRTLCSSDRGCKKGWMDPQSKGIQTGRCVVYEGNQKTCEVSAWCPIEAVEEAPRPALLNSAENFTVLIKNNIDFPGHNYTTYAKYYKENNVEKRTLIKVFGIRFDILVFGTGGKFDIIQLVVYIGSTLSYFGLVRDSLFHALGKWFGEGSD

SEQ ID NO: 3087 - protein, 362 aa, Homo sapiens
MDDDDFGGFEAAETFDGGSGETQTTSPAIPWAAFPAVSGVHLSPSSPEIVLDRDHSSSIGCLSSDAIISSPENTHAANSIVSQTIPKAQIQQSTHTHLDISLFPLGLTDEKSNGTIALVDDSEDPGANVSNIQLQQKISSLEIKLKVSEEEKQRIKQDVESLMEKHNVLEKGFLKEKEQEAISFQDRYKELQEKHKQELEDMRKAGHEALSIIVDEYKALLQSSVKQQVEAIEKQYISAIEKQAHKCEELLNAQHQRLLEMLDTEKELLKEKIKEALIQQSQEQKEILEKCLEEERQRNKEALVSAAKLEKEAVKDAVLKVVEEERKNLEKAHAEERELWKTEHAKDQEKVSQEIQKAIQEQ

SEQ ID NO: 3088 - protein, 510 aa, Homo sapiens
MGRPTQWPSLLLLLLLPGPPPVAGLEDAAFPHLGESLQPLPRACPLRCSCPRVDTVDCDGLDLRVFPDNITRAAQHLSLQNNQLQELPYNELSRLSGLRTLNLHNNLISSEGLPDEAFESLTQLQHLCVAHNKLSVAPQFLPRSLRVADLAANQVMEIFPLTFGEKPALRSVYLHNNQLSNAGLPPDAFRGSEAIATLSLSNNQLSYLPPSLPPSLERLHLQNNLISKVPRGALSRQTQLRELYLQHNQLTDSGLDATTFSKLHSLEYLDLSHNQLTTVPAGLPRTLAILHLGRNRIRQVEAARLHGARGLRYLLLQHNQLGSSGLPAGALRPLRGLHTLHLYGNGLDRVPPALPRRLRALVLPHNHVAALGARDLVATPGLTELNLAYNRLASARVHHRAFRRLRALRSLDLAGNQLTRLPMGLPTGLRTLQLQRNQLRMLEPEPLAGLDQLRELSLAHNRLRVGDIGPGTWHELQALQVRHRLVSHTVPRAPPSPCLPCHVPNILVSW

SEQ ID NO: 3089 - protein, 364 aa, Homo sapiens
MPACCSCSDVFQYETNKVTRIQSMNYGTIKWFFHVIIFSYVCFALVSDKLYQRKEPVISSVHTKVKGIAEVKEEIVENGVKKLVHSVFDTADYTFPLQGNSFFVMTNFLKTEGQEQRLCPEYPTRRTLCSSDRGCKKGWMDPQSKGIQTGRCVVYEGNQKTCEVSAWCPIEAVEEAPRPALLNSAENFTVLIKNNIDFPGHNYTTRNILPGLNITCTFHKTQNPQCPIFRLGDIFRETGDNFSDVAIQGGIMGIEIYWDCNLDRWFHHCRPKYSFRRLDDKTTNVSLYPGYNFRYAKYYKENNVEKRTLIKVFGIRFDILVFGTGGKFDIIQLVVYIGSTLSYFGLVRDSLFHALGKWFGEGSD

SEQ ID NO: 3090 - protein, 1134 aa, Homo sapiens
MDGASAEQDGLQEDRSHSGPSSLPEAPLKPPGPLVPPDQQDKVQCAEVNRASTEGESPDGPGQGGLCQNGPTPPFPDPPSSLDPTTSPVGPDASPGVAGFHDNLRKSQGTSAEGSVRKEALQSLRLSLPMQETQLCSTDSPLPLEKEEQVRLQARKWLEEQLKQYRVKRQQERSSQPATKTRLFSTLDPELMLNPENLPRASTLAMTKEYSFLRTSVPRGPKVGSLGLPAHPREKKTSKSSKIRSLADYRTEDSNAGNSGGNVPAPDSTKGSLKQNRSSAASVVSEISLSPDTDDRLENTSLAGDSVSEVDGNDSDSSSYSSASTRGTYGILSKTVGTQDTPYMVNGQEIPADTLGQFPSIKDVLQAAAAEHQDQGQEVNGEVRSRRDSICSSVSLESSAAETQEEMLQVLKEKMRLEGQLEALSLEASQALKEKAELQAQLAALSTKLQAQVECSHSSQQRQDSLSSEVDTLKQSCWDLERAMTDLQNMLEAKNASLASSNNDLQVAEEQYQRLMAKVEDMQRSMLSKDNTVHDLRQQMTALQSQLQQVQLERTTLTSKLKASQAEISSLQSVRQWYQQQLALAQEARVRLQGEMAHIQVGQMTQAGLLEHLKLENVSLSQQLTETQHRSMKEKGRIAAQLQGIEADMLDQEAAFMQIQEAKTMVEEDLQRRLEEFEGERERLQRMADSAASLEQQLEQVKLTLLQRDQQLEALQQEHLDLMKQLTLTQEALQSREQSLDALQTHYDELQARLGELQGEAASREDTICLLQNEKIILEAALQAAKSGKEELDRGARRLEEGTEETSETLEKLREELAIKSGQVEHLQQETAALKKQMQKIKEQFLQQKVMVEAYRRDATSKDQLISELKATRKRLDSELKELRQELMQVHGEKRTAEAELSRLHREVAQVRQHMADLEGHLQSAQKERDEMETHLQSLQFDKEQMVAVTEANEALKKQIEELQQEARKAITEQKQKMRRLGSDLTSAQKEMKTKHKAYENAVGILSRRLQEALAAKEAADAELGQLRAQGGSSDSSLALHERIQALEAELQAVSHSKTLLEKELQEVIALTSQELEESREKVLELEDEVRPGHLLWRQRGAGHVSPGHAATRETRRTKLHRVPSVATFGVATF

SEQ ID NO: 3091 - protein, 128 aa, Homo sapiens
MGFLQLLVVAVLASEHRVAGAAEVFGNSSEDPVPGGCNLEFDLDIDPNIYLEYNFFETTIKFAPANLGYARGVDPPPCDAGTDQDSRWRLQYDVYQYFLPENDLTEEMLLKHLQRMVSVPQVKASALK

SEQ ID NO: 3092 - protein, 1274 aa, Homo sapiens
MPEPGKKPVSAFSKKPRSVEVAAGSPAVFEAETERAGVKVRWQRGGSDISASNKYGLATEGTRHTLTVREVGPADQGSYAVIAGSSKVKFDLKVIEAEKAEPMLAPAPAPAEATGAPGEAPAPAAELGESAPSPKGSSSAALNGPTPGAPDDPIGLFVMRPQDGEVTVGGSITFSARVAGASLLKPPVVKWFKGKWVDLSSKVGQHLQLHDSYDRASKVYLFELHITDAQPAFTGSYRCEVSTKDKFDCSNFNLTVHEAMGTGDLDLLSAFRRTSLAGGGRRISDSHEDTGILDFSSLLKKRDSFRTPRDSKLEAPAEEDVWEILRQAPPSEYERIAFQYGVTDLRGMLKRLKGMRRDEKKSTAFQKKLEPAYQVSKGHKIRLTVELADHDAEVKWLKNGQEIQMSGSKYIFESIGAKRTLTISQCSLADDAAYQCVVGGEKCSTELFVKEPPVLITRPLEDQLVMVGQRVEFECEVSEEGAQVKWLKDGVELTREETFKYRFKKDGQRHHLIINEAMLEDAGHYALCTSGGQALAELIVQEKKLEVYQSIADLMVGAKDQAVFKCEVSDENVRGVWLKNGKELVPDSRIKVSHIGRVHKLTIDDVTPADEADYSFVPEGFACNLSAKLHFMEVKIDFVPRQEPPKIHLDCPGRIPDTIVVVAGNKLRLDVPISGDPAPTVIWQKAITQGNKAPARPAPDAPEDTGDSDEWVFDKKLLCETEGRVRVETTKDRSIFTVEGAEKEDEGVYTVTVKNPVGEDQVNLTVKVIDVPDAPAAPKISNVGEDSCTVQWEPPAYDGGQPILGYILERKKKKSYRWMRLNFDLIQELSHEARRMIEGVVYEMRVYAVNAIGMSRPSPASQPFMPIGPPSEPTHLAVEDVSDTTVSLKWRPPERVGAGGLDGYSVEYCPEGCSEWVAALQGLTEHTSILVKDLPTGARLLFRVRAHNMAGPGAPVTTTEPVTVQEILQRPRLQLPRHLRQTIQKKVGEPVNLLIPFQGKPRPQVTWTKEGQPLAGEEVSIRNSPTDTILFIRAARRVHSGTYQVTVRIENMEDKATLVLQVVDKPSPPQDLRVTDAWGLNVALEWKPPQDVGNTELWGYTVQKADKKTMEWFTVLEHYRRTHCVVPELIIGNGYYFRVFSQNMVGFSDRAATTKEPVFIPRPGITYEPPNYKALDFSEAPSFTQPLVNRSVIAGYTAMLCCAVRGSPKPKISWFKNGLDLGEDARFRMFSKQGVLTLEIRKPCPFDGGIYVCRATNLQGEARCECRLEVRVPQ

SEQ ID NO: 3093 - protein, 143 aa, Homo sapiens
MAAEDVVATGADPSDLESGGLLHEIFTSPLNLLLLGLCIFLLYKIVRGDQPAASGDSDDDEPPPLPRLKRRDFTPAELRRFDGVQDPRILMAINGKVFDVTKGRKFYGPVKYHHVGKLLKEGEEPTVYSDEEEPKDESARKND

SEQ ID NO: 3094 - protein, 118 aa, Homo sapiens
MGLSTVPDLLLPLVLLELLVGIYPSGVIGLVPHLGDREKRDSVCPQGKYIHPQNNSICCTKCHKGPGQDTDCRECESGSFTASENHLRHCLSCSKCRKEMGQVEISSCTVDRDTVCGC

SEQ ID NO: 3095 - protein, 98 aa, Homo sapiens
LVQRKARAAAERNLRNERRERAKQARVSQELKKAAKRTVSISEGPDTLGDGMRERRETLALAPEPEPLEKEACEKWKRPFRPRLSFPGTFVGLPQPPP

SEQ ID NO: 3096 - protein, 635 aa, Homo sapiens
MGAAGLQGAPGGAEHPGRCGPGAVPRIRGSVVLAPRWRSSPAGGWSDPLFFGGADPEPELYLDPFCPPGFSSQKFPMQHVLCNHPPWIFTCLCAEGNIQPGDPGPGDQEKQQQASEGRPWSDQAEGPEGEGAMPLFGRTKKRTLGAFSRPPQRQPVSSRNGLRGVELEASPAQSGNPEETDKLLKRIEVLGFGTVNCGECGLSFSKMTNLLSHQRIHSGEKPYVCGVCEKGFSLKKSLARHQKAHSGEKPIVCRECGRGFNRKSTLIIHERTHSGEKPYMCSECGRGFSQKSNLIIHQRTHSGEKPYVCRECGKGFSQKSAVVRHQRTHLEEKTIVCSDCGLGFSDRSNLISHQRTHSGEKPYACKECGRCFRQRTTLVNHQRTHSKEKPYVCGVCGHSFSQNSTLISHRRTHTGEKPYVCGVCGRGFSLKSHLNRHQNIHSGEKPIVCKDCGRGFSQQSNLIRHQRTHSGEKPMVCGECGRGFSQKSNLVAHQRTHSGERPYVCRECGRGFSHQAGLIRHKRKHSREKPYMCRQCGLGFGNKSALITHKRAHSEEKPCVCRECGQGFLQKSHLTLHQMTHTGEKPYVCKTCGRGFSLKSHLSRHRKTTSVHHRLPVQPDPEPCAGQPSDSLYSL

SEQ ID NO: 3097 - protein, 503 aa, Homo sapiens
MEAIPCVVGDEEVWTSDVQYQVSPFNHGHKVAKFCYADKSLLNKAIEAALAARKEWDLKPIADRAQIFLKAADMLSGPRRAEILAKTMVGQGKTVIQAEIDAAAELIDFFRFNAKYAVELEGQQPISVPPSTNSTVYRGLEGFVAAISPFNFTAIGGNLAGAPALMGNVVLWKPSDTAMLASYAVYRILREAGLPPNIIQFVPADGPLFGDTVTSSEHLCGINFTGSVPTFKHLWKQVAQNLDRFHTFPRLAGECGGKNFHFVHRSADVESVVSGTLRSAFEYGGQKCSACSRLYVPHSLWPQIKGRLLEEHSRIKVGDPAEDFGTFFSAVIDAKSFARIKKWLEHARSSPSLTILAGGKCDDSVGYFVEPCIVESKDPQEPIMKEEIFGPVLSVYVYPDDKYKETLQLVDSTTSYGLTGAVFSQDKDVVQEATKVLRNAAGNFYINDKSTGSIVGQQPFGGARASGTNDKPGGPHYILRWTSPQVIKETHKPLGDWSYAYMQ

SEQ ID NO: 3098 - protein, 1187 aa, Homo sapiens
MKNLLTEKCISSHNFHQKVIKQRMEKKVDSRYFKDGAVKKPYSAKTLSNKKSSASFGIRRELPSTSHLVQYRGTHTCTRQGRLRELRIRFYYEQRLLRKVFEEWKEEWWVFQHEWKLCVRADCHYRYYLYNLMFQTWKTYVRQQQEMRNKYIRAEVHDAKQKMRQAWKSWLIYVVVRRTKLQMQTTALEFRQRIILRVWWSTWRQRLGQVRVSRALHASALKHRALSLQVQAWSQWREQLLYVQKEKQKVVSAVKHHQHWQKRRFLKAWLEYLQVRRVKRQQNEMAERFHHVTVLQIYFCDWQQAWERRESLYAHHAQVEKLARKMALRRAFTHWKHYMLLCAEEAAQFEMAEEHHRHSQLLLHRFWNLWRSQIEQKKERELLPLLHAAWDHYRIALLCKCIELWLQYTQKRRYKQLLQARADGHFQQRALPAAFHTWNRLWRWRHQENVLSARATRFHRETLEKQVFSLWRQKMFQHRENRLAERMAILHAERQLLYRSWFMWHQQAAARHQEQEWQTVACAHHRHGRLKKAFCLWRESAQGLRTERTGRVRAAEFHMAQLLRWAWSQWRECLALRGAERQKLMRADLHHQHSVLHRALQAWVTYQGRVRSILREVAARESQHNRQLLRGALRRWKENTMARVDEAKKTFQASTHYRRTICSKVLVQWREAVSVQMYYRQQEDCAIWEAQKVLDRGCLRTWFQRWWDCSRRSAQQRLQLERAVQHHHRQLLLEGLARWKTHHLQCVRKRLLHRQSTQLLAQRLSRTCFRQWRQQLAARRQEQRATVRALWFWAFSLQAKVWATWLAFVLERRRKKARLQWALQAYQGQLLQEGATRLLRFAASMKASRQQLQAQQQVQAAHSLHRAVRRCATLWKQKVLGRGGKPQPLAAIAPSRKVTFEGPLLNRIAAGAGDGTLETKRPQASRPLGALGRLAAEEPHALELNTAHSARKQPRRPHFLLEPAQSQRPQKPQEHGLGMAQPAAPSLTRPFLAEAPTALVPHSPLPGALSSAPGPKQPPTASTGPELLLLPLSSFMPCGAAAPARVSAQRATPRDKPPVPSSLASVPDPHLLLPGDFSATRAGPGLSTAGSLDLEAELEEIQQQLLHYQTTKQNLWSCRRQASSLRRWLELNREEPGPEDQEVEQQVQKELEQVEMQIQLLAEELQAQRQPIGACVARIQALRQALC

SEQ ID NO: 3099 - protein, 132 aa, Homo sapiens
MHDSNNVEKDITPSELPANPGCLHSKEHSIKATLIWRLFFLIMFLTIIVCGMVAALSAIRANCHQEPSVCLQAACPESWIGFQRKCFYFSDDTKNWTSSQRFCDSQDADLAQVESFQELVSYPGSRRVCLFE

SEQ ID NO: 3100 - protein, 662 aa, Homo sapiens
MVSKLSQLQTELLAALLESGLSKEALIQALGEPGPYLLAGEGPLDKGESCGGGRGELAELPNGLGETRGSEDETDDDGEDFTPPILKELENLSPEEAAHQKAVVETLLQEDPWRVAKMVKSYLQQHNIPQREVVDTTGLNQSHLSQHLNKGTPMKTQKRAALYTWYVRKQREVAQQFTHAGQGGLIEEPTGDELPTKKGRRNRFKWGPASQQILFQAYERQKNPSKEERETLVEECNRAECIQRGVSPSQAQGLGSNLVTEVRVYNWFANRRKEEAFRHKLAMDTYSGPPPGPGPGPALPAHSSPGLPPPALSPSKVHGVRYGQPATSETAEVPSSSGGPLVTVSTPLHQVSPTGLEPSHSLLSTEAKLVSAAGGPLPPVSTLTALHSLEQTSPGLNQQPQNLIMASLPGVMTIGPGEPASLGPTFTNTGASTLVIGLASTQAQSVPVINSMGSSLTTLQPVQFSQPLHPSYQQPLMPPVQSHVTQSPFMATMAQLQSPHALYSHKPEVAQYTHTGLLPQTMLITDTTNLSALASLTPTKQVRSRPAGPPLACDRAPHPHIPRAQEAALLPQVFTSDTEASSESGLHTPASQATTLHVPSQDPASIQHLQPAHRLSASPTVSSSSLVLYQSSDSSNGQSHLLPSNHSVIETFISTQMASSSQ

SEQ ID NO: 3101 - protein, 140 aa, Homo sapiens
MPTVDDILEQVGESGWFQKQAFLILCLLSAAFAPICVGIVFLGFTPDHHCQSPGVAELSQRCGWSPAEELNYTVPGLGPAGEAFLGQCRRYEVDWNQSALSCVDPLASLATNRSHLPLGPCQDGWVYDTPGSSIVTEVWP

SEQ ID NO: 3102 - protein, 791 aa, Homo sapiens
MIGPSPNPLILSYLKYAISSQMVSYSSVLTAISKFDDFSRDLCVQALLDIMDMFCDRLSCHGKAEECIGLCRALLSALHWLLRCTAASAERLREGLEAGTPAAGEKQLAMCLQRLEKTLSSTKNRALLHIAKLEEASSWTAIEHSLLKLGEILANLSNPQLRSQAEQCGTLIRSIPTMLSVHAEQMHKTGFPTVHAVILLEGTMNLTGETQSLVEQLTMVKRMQHIPTPLFVLEIWKACFVGLIESPEGTEELKWTAFTFLKIPQVLVKLKKYSHGDKDFTEDVNCAFEFLLKLTPLLDKADQRCNCDCTNFLLQECGKQGLLSEASVNNLMAKRKADREHAPQQKSGENANIQPNIQLILRAEPTVTNILKTMDADHSKSPEGLLGVLGHMLSGKSLDLLLAAAAATGKLKSFARKFINLNEFTTYGSEESTKPASVRALLFDISFLMLCHVAQTYGSEVILSESRTGAEVPFFETWMQTCMPEEGKILNPDHPCFRPDSTKVESLVALLNNSSEMKLVQMKWHEACLSISAAILEILNAWENGVLAFESIQKITDNIKGKVCSLAVCAVAWLVAHVRMLGLDEREKSLQMIRQLAGPLFSENTLQFYNERVVIMNSILERMCADVLQQTATQIKFPSTGVDTMPYWNLLPPKRPIKEVLTDIFAKVLEKGWVDSRSIHIFDTLLHMGGVYWFCNNLIKELLKETRKEHTLRAVELLYSIFCLDMQQVTLVLLGHILPGLLTDSSKWHSLMDPPGTALAKLAVWCALSSYSSHKGQASTRQKKRHREDIE

SEQ ID NO: 3103 - protein, 178 aa, Homo sapiens
MEVRWDRSHRYPAVHVYMDGDHVAGEQMAEYRGRTVLVSDAIDEGRLTLQILSARPSDDGQYRCLFEKDDVYQEASLDLKVVSLGSSPLITVEGQEDGEMQPMCSSDGWFPQPHVPWRDMEGKTIPSSSQALTQGSHGLFHVQTLLRVTNISAVDVTCSISIPFLGEEKIATFSLSGW

SEQ ID NO: 3104 - protein, 136 aa, Homo sapiens
MRKGVLKDPEIADLFYKDDPEELFIGLHEIGHGSFGAVYFATNAHTSEVVAIKKMSYSGKQTHEKWQDILKEVKFLRQLKHPNTIEYKGCYLKEHTAWLVMEYCLGSASDLLEVHKKPLQEVEIAAITHGALHGLA

SEQ ID NO: 3105 - protein, 2433 aa, Homo sapiens
MPAILVASKMKSGLPKPVHSAAPILHVPPARAGPQPCYLKLGSKVEVSKTTYPSQIPLKSQVLQGLQEPAGEGLPLRKSGSVENGFDTQIYTDWANHYLAKSGHKRLIRDLQQDVTDGVLLAQIIQVVANEKIEDINGCPKNRSQMIENIDACLNFLAAKGINIQGLSAEEIRNGNLKAILGLFFSLSRYKQQQQQPQKQHLSSPLPPAVSQVAGAPSQCQAGTPQQQVPVTPQAPCQPHQPAPHQQSKAQAEMQSRLPGPTARVSAAGSEAKTRGGSTTANNRRSQSFNNYDKSKPVTSPPPPPSSHEKEPLASSASSHPGMSDNAPASLESGSSSTPTNCSTSSAIPQPGAATKPWRSKSLSVKHSATVSMLSVKPPGPEAPRPTPEAMKPAPNNQKSMLEKLKLFNSKGGSKAGEGPGSRDTSCERLETLPSFEESEELEAASRMLTTVGPASSSPKIALKGIAQRTFSRALTNKKSSLKGNEKEKEKQQREKDKEKSKDLAKRASVTERLDLKEEPKEDPSGAAVPEMPKKSSKIASFIPKGGKLNSAKKEPMAPSHSGIPKPGMKSMPGKSPSAPAPSKEGERSRSGKLSSGLPQQKPQLDGRHSSSSSSLASSEGKGPGGTTLNHSISSQTVSGSVGTTQTTGSNTVSVQLPQPQQQYNHPNTATVAPFLYRSQTDTEGNVTAESSSTGVSVEPSHFTKTGQPALEELTGEDPEARRLRTVKNIADLRQNLEETMSSLRGTQVTHSTLETTFDTNVTTEMSGRSILSLTGRPTPLSWRLGQSSPRLQAGDAPSMGNGYPPRANASRFINTESGRYVYSAPLRRQLASRGSSVCHVDVSDKAGDEMDLEGISMDAPGYMSDGDVLSKNIRTDDITSGYMTDGGLGLYTRRLNRLPDGMAVVRETLQRNTSLGLGDADSWDDSSSVSSGISDTIDNLSTDDINTSSSISSYANTPASSRKNLDVQTDAEKHSQVERNSLWSGDDVKKSDGGSDSGIKMEPGSKWRRNPSDVSDESDKSTSGKKNPVISQTGSWRRGMTAQVGITMPRTKPSAPAGALKTPGTGKTDDAKVSEKGRLSPKASQVKRSPSDAGRSSGDESKKPLPSSSRTPTANANSFGFKKQSGSAAGLAMITASGVTVTSRSATLGKIPKSSALVSRSAGRKSSMDGAQNQDDGYLALSSRTNLQYRSLPRPSKSNSRNGAGNRSSTSSIDSNISSKSAGLPVPKLREPSKTALGSSLPGLVNQTDKEKGISSDNESVASCNSVKVNPAAQPVSSPAQTSLQPGAKYPDVASPTLRRLFGGKPTKQVPIATAENMKNSVVISNPHATMTQQGNLDSPSGSGVLSSGSSSPLYSKNVDLNQSPLASSPSSAHSAPSNSLTWGTNASSSSAVSKDGLGFQSVSSLHTSCESIDISLSSGGVPSHNSSTGLIASSKDDSLTPFVRTNSVKTTLSESPLSSPAASPKFCRSTLPRKQDSDPHLDRNTLPKKGLRYTPTSQLRTQEDAKEWLRSHSAGGLQDTAANSPFSSGSSVTSPSGTRFNFSQLASPTTVTQMSLSNPTMLRTHSLSNADGQYDPYTDSRFRNSSMSLDEKSRTMSRSGSFRDGFEEVHGSSLSLVSSTSSVYSTPEEKCQSEIRKLRRELDASQEKVSALTTQLTANAHLVAAFEQSLGNMTIRLQSLTMTAEQKDSELNELRKTIELLKKQNAAAQAAINGVINTPELNCKGNGTAQSADLRIRRQHSSDSVSSINSATSHSSVGSNIESDSKKKKRKNWVNIQLRSSFKQAFGKKKSPKSASSHSDIEEMTDSSLPSSPKLPHNGSTGSTPLLRNSHSNSLISECMDSEAETVMQLRNELRDKEMKLTDIRLEALSSAHQLDQLREAMNRMQSEIEKLKAENDRLKSESQGSGCSRAPSQVSISASPRQSMGLSQHSLNLTESTSLDMLLDDTGECSARKEGGRHVKIVVSFQEEMKWKEDSRPHLFLIGCIGVSGKTKWDVLDGVVRRLFKEYIIHVDPVSQLGLNSDSVLGYSIGEIKRSNTSETPELLPCGYLVGENTTISVTVKGLAENSLDSLVFESLIPKPILQRYVSLLIEHRRIILSGPSGTGKTYLANRLSEYIVLREGRELTDGVIATFNVDHKSSKELRQYLSNLADQCNSENNAVDMPLVIILDNLHHVSSLGEIFNGLLNCKYHKCPYIIGTMNQATSSTPNLQLHHNFRWVLCANHTEPVKGFLGRFLRRKLMETEISGRVRNMELVKIIDWIPKVWHHLNRFLEAHSSSDVTIGPRLFLSCPIDVDGSRVWFTDLWNYSIIPYLLEAVREGLQLYGRRAPWEDPAKWVMDTYPWAASPQQHEWPPLLQLRPEDVGFDGYSMPREGSTSKQMPPSDAEGDPLMNMLMRLQEAANYSSPQSYDSDSNSNSHHDDILDSSLESTL

SEQ ID NO: 3106 - protein, 240 aa, Homo sapiens
MLHALVRIGREEGLKALYSGIAPAMLRQASYGTIKIGTYQSLKRLFIERPEDETLPINVICGILSGVISSTIANPTDVLKIRMQAQSNTIQGGMIGNFMNIYQQEGTRGLWKGVSLTAQRAAIVVGVELPVYDITKKHLILSGLMGDTVYTHFLSSFTCGLAGALASNPVDVVRTRMMNQRVLRDGRCSGYTGTLDCLLQTWKNEGFFALYKGFWPNWLRLGPWNIIFFVTYEQLKKLDL

SEQ ID NO: 3107 - protein, 489 aa, Homo sapiens
MTNYSFHCNVCHHSGNTYFLRKQANLKEMCLSALANLTWQSRTQDEHPKTMFSKDKDIIPFIDKYWECMTTRQRPGKMTWPNNIVKTMSKERDVFLVKEHPDPGSKDPEEDYPKFGLLDQDLSNIGPAYDNQKQSSAVSTSGNLNGGIAAGSSGKGRGAKRKQQDGGTTGTTKKARSDPLFSAQRLPPHGYPLEHPFNKDGYRYILAEPDPHAPDPEKLELDCWAGKPIPGDLYRACLYERVLLALHDRAPQLKISDDRLTVVGEKGYSMVRASHGVRKGAWYFEITVDEMPPDTAARLGWSQPLGNLQAPLGYDKFSYSWRSKKGTKFHQSIGKHYSSGYGQGDVLGFYINLPEDTETAKSLPDTYKDKALIKFKSYLYFEEKDFVDKAEKSLKQTPHSEIIFYKNGVNQGVAYKDIFEGVYFPAISLYKSCTVSINFGPCFKYPPKDLTYRPMSDMGWGAVVEHTLADVLYHVETEVDGRRSPPWEP

SEQ ID NO: 3108 - protein, 258 aa, Homo sapiens
MPACCSCSDVFQYETNKVTRIQSMNYGTIKWFFHVIIFSYVCFALVSDKLYQRKEPVISSVHTKVKGIAEVKEEIVENGVKKLVHSVFDTADYTFPLQGNSFFVMTNFLKTEGQEQRLCPEYPTRRTLCSSDRGCKKGWMDPQSKGIQTGRCVVYEGNQKTCEVSAWCPIEAVEEAPRPALLNSAENFTVLIKNNIDFPGHNYTTRNILPGLNITCTFHKTQNPQCPIFRLGDIFRETGDNFSDVAIQIRQVLQGKQC

SEQ ID NO: 3109 - protein, 184 aa, Homo sapiens
NRALRLVDGGGACAGRVEMLEHGEWGSVCDDTWDLEDAHVVCRQLGCGWAVQALPGLHFTPGRGPIHRDQVNCSGAEAYLWDCPGLPGQHYCGHKEDAGAVCSASRSLHNLSTPEVPASVQTVTIESSVTVKIENKESRELMLLIPSIVLGILLLGSLIFIAFILLRIKGKYALPVMVNHQHLP

SEQ ID NO: 3110 - protein, 969 aa, Homo sapiens
MASKRKSTTPCMIPVKTVVLQDASMEAQPAETLPEGPQQDLPPEASAASSEAAQNPSSTDGSTLANGHRSTLDGYLYSCKYCDFRSHDMTQFVGHMNSEHTDFNKDPTFVCSGCSFLAKTPEGLSLHNATCHSGEASFVWNVAKPDNHVVVEQSIPESTSTPDLAGEPSAEGADGQAEIIITKTPIMKIMKGKAEAKKIHTLKENVPSQPVGEALPKLSTGEMEVREGDHSFINGAVPVSQASASSAKNPHAANGPLIGTVPVLPAGIAQFLSLQQQPPVHAQHHVHQPLPTAKALPKVMIPLSSIPTYNAAMDSNSFLKNSFHKFPYPTKAELCYLTVVTKYPEEQLKIWFTAQRLKQGISWSPEEIEDARKKMFNTVIQSVPQPTITVLNTPLVASAGNVQHLIQAALPGHVVGQPEGTGGGLLVTQPLMANGLQATSSPLPLTVTSVPKQPGVAPINTVCSNTTSAVKVVNAAQSLLTACPSITSQAFLDASIYKNKKSHEQLSALKGSFCRNQFPGQSEVEHLTKVTGLSTREVRKWFSDRRYHCRNLKGSRAMIPGDHSSIIIDSVPEVSFSPSSKVPEVTCIPTTATLATHPSAKRQSWHQTPDFTPTKYKERAPEQLRALESSFAQNPLPLDEELDRLRSETKMTRREIDSWFSERRKKVNAEETKKAEENASQEEEEAAEDEGGEEDLASELRVSGENGSLEMPSSHILAERKVSPIKINLKNLRVTEANGRNEIPGLGACDPEDDESNKLAEQLPGKVSCKKTAQQRHLLRQLFVQTQWPSNQDYDSIMAQTGLPRPEVVRWFGDSRYALKNGQLKWYEDYKRGNFPPGLLVIAPGNRELLQDYYMTHKMLYEEDLQNLCDKTQMSSQQKQTEFDLINVKDWPVWETACHVEEPNPTLCCHMPFPCPAAGHLGELPESSQTAQSLPLPSACPPPSKQQARWGSHQFFLPQCRTFPLPSNG

SEQ ID NO: 3111 - protein, 1022 aa, Homo sapiens
MKDEAGERDREVSSLNSKLLSLQLDIKNLHDVCKRQRKTLQDNQLCMEEAMNSSHDKKQAQALAFEESEVEFGSSKQCHLRQLQQLKKKLLVLQQELEFHTEELQTSYYSLRQYQSILEKQTSDLVLLHHHCKLKEDEVILYEEEMGNHNENTGEKLHLAQEQLALAGDKIASLERSLNLYRDKYQSSLSNIELLECQVKMLQGELGGIMGQEPENKGDHSKVRIYTSPCMIQEHQETQKRLSEVWQKVSQQDDLIQELRNKLACSNALVLEREKALIKLQADFASCTATHRYPPSSSEECEDIKKILKHLQEQKDSQCLHVEEYQNLVKDLRVELEAVSEQKRNIMKDMMKLELDLHGLREETSAHIERKDKDITILQCRLQELQLEFTETQKLTLKKDKFLQEKDEMLQELEKKLTQVQNSLLKKEKELEKQQCMATELEMTVKEAKQDKSKEAECKALQAEVQKLKNSLEEAKQQERLAGEAPAAQQAAQCKEEAALAGCHLEDTQRKLQKGLLLDKQKADTIQELQRELQMLQKESSMAEKEQTSNRKRVEELSLELSEALRKLENSDKEKRQLQKTVAEQDMKMNDMLDRIKHQHREQGSIKCKLEEDLQEATKLLEDKREQLKKSKEHEKLMEGELEALRQEFKKKDKTLKENSRKLEEENENLRAELQCCSTQLESSLNKYNTSQQVIQDLNKEIALQKESLMSLQAQLDKALQKEKHYLQTTITKEAYDALSRKSAACQDDLTQALEKLNHVTSETKSLQQSLTQTQEKKAQLEEEIIAYEERMKKLNTELRKLRGFHQESELEVHAFDKKLEEMSCQVLQWQKQHQNDLKMLAAKEEQLREFQEEMAALKENLLEDDKEPCCLPQWSVPKDTCRLYRGNDQIMTNLEQWAKQQKVANEKLGNQLREQVKYIAKLSGEKDHLHSVMVHLQQENKKLKKEIEEKKMKAENTRLCTKALGPSRTESTQREKVCGTLGWKGLPQDMGQRMDLTKYIGMPHCPGTSAICQKNKCDFFL

SEQ ID NO: 3112 - protein, 870 aa, Homo sapiens
MSVPNVLAKALYDNVAESPDELSFRKGDIMTVLEQDTQGLDGWWLCSLHGRQGIVPGNRLKILVGMYDKKPAGPGPGPPATPAQPQPGLHAPAPPASQYTPMLPNTYQPQPDSVYLVPTPSKAQQGLYQVPGPSPQFQSPPAKQTSTFSKQTPHHPFPSPATDLYQVPPGPGGPAQDIYQVPPSAGMGHDIYQVPPSMDTRSWEGTKPPAKVVVPTRVGQGYVYEAAQPEQDEYDIPRHLLAPGPQDIYDVPPVRGLLPSQYGQEVYDTPPMAVKGPNGRDPLLEVYDVPPSVEKGLPPSNHHAVYDVPPSVSKDVPDGPLLREETYDVPPAFAKAKPFDPARTPLVLAAPPPDSPPAEDVYDVPPPAPDLYDVPPGLRRPGPGTLYDVPRERVLPPEVADGGVVDSGVYAVPPPAEREAPAEGKRLSASSTGSTRSSQSASSLEVAGPGREPLELEVAVEALARLQQGVSATVAHLLDLAGSAGATGSWRSPSEPQEPLVQDLQAAVAAVQSAVHELLEFARSAVGNAAHTSDRALHAKLSRQLQKMEDVHQTLVAHGQALDAGRGGSGATLEDLDRLVACSRAVPEDAKQLASFLHGNASLLFRRTKATAPGPEGGGTLHPNPTDKTSSIQSRPLPSPPKFTSQDSPDGQYENSEGGWMEDYDYVHLQGKEEFEKTQKELLEKGSITRQGKSQLELQQLKQFERLEQEVSRPIDHDLANWTPAQPLAPGRTGGLGPSDRQLLLFYLEQCEANLTTLTNAVDAFFTAVATNQPPKIFVAHSKFVILSAHKLVFIGDTLSRQAKAADVRSQVTHYSNLLCDLLRGIVATTKAAALQYPSPSAAQDMVERVKELGHSTQQFRRVLGQLAAA

SEQ ID NO: 3113 - protein, 623 aa, Homo sapiens
MNKNVVFVIDISGSMRGQKVKQTKEALLKILGDMQPGDYFDLVLFGTRVQSWKGSLVQASEANLQAAQDFVRGFSLDEATNLNGGLLRGIEILNQVQESLPELSNHASILIMLTDGDPTEGVTDRSQILKNVRNAIRGRFPLYNLGFGHNVDFNFLEVMSMENNGRAQRIYEDHDATQQLQGFYSQVAKPLLVDVDLQYPQDAVLALTQNHHKQYYEGSEIVVAGRIADNKQSSFKADVQAHGEGQEFSITCLVDEEEMKKLLRERGHMLENHVERLWAYLTIQELLAKRMKVDREERANLSSQALQMSLDYGFVTPLTSMSIRGMADQDGLKPTIDKPSEDSPPLEMLGPRRTFVLSALQPSPTHSSSNTQRLPDRVTGVDTDPHFIIHVPQKEDTLCFNINEEPGVILSLVQDPNTGFSVNGQLIGNKARSPGQHDGTYFGRLGIANPATDFQLEVTPQNITLNPGFGGPVFSWRDQAVLRQDGVVVTINKKRNLVVSVDDGGTFEVVLHRVWKGSSVHQDFLGFYVLDSHRMSARTHGLLGQFFHPIGFEVSDIHPGSDPTKPDATMVVRNRRLTVTRGLQKDYSKDPWHGAEVSCWFIHNNGAGLIDGAYTDYIVPDIF

SEQ ID NO: 3114 - protein, 466 aa, Homo sapiens
MEVRWFRSQFSPAVFVYKGGRERTEEQMEEYRGRTTFVSKDISRGSVALVIHNITAQENGTYRCYFQEGRSYDEAILHLVVAGLGSKPLISMRGHEDGGIRLECISRGWYPKPLTVWRDPYGGVAPALKEVSMPDADGLFMVTTAVIIRDKSVRNMSCSINNTLLGQKKESVIFIPESFMPSVSPCAVALPIIVVILMIPIAVCIYWINKLQKEKKILSGEKEFERETREIALKELEKERVQKEEELQVKEKLQEELRWRRTFLHAVDVVLDPDTAHPDLFLSEDRRSVRRCPFRHLGESVPDNPERFDSQPCVLGRESFASGKHYWEVEVENVIEWTVGVCRDSVERKGEVLLIPQNGFWTLEMHKGQYRAVSSPDRILPLKESLCRVGVFLDYEAGDVSFYNMRDRSHIYTCPRSAFSVPVRPFFRLGCEDSPIFICPALTGANGVTVPEEGLTLHRVGTHQSL

SEQ ID NO: 3115 - protein, 278 aa, Homo sapiens
MVSKLSQLQTELLAALLESGLSKEALIQALGEPGPYLLAGEGPLDKGESCGGGRGELAELPNGLGETRGSEDETDDDGEDFTPPILKELENLSPEEAAHQKAVVETLLQEDPWRVAKMVKSYLQQHNIPQREVVDTTGLNQSHLSQHLNKGTPMKTQKRAALYTWYVRKQREVAQRRNASREGCPHHRHRGWAPTSSRRCVSTTGLPTGAKKKPSGTSWPWTRTAGPPQGQARDLRCPLTAPLACLHLPSPPVRSTVCAMDSLRPVRLQKYPQAAAVP

SEQ ID NO: 3116 - protein, 1506 aa, Homo sapiens
MASGAGGVGGGGGGKIRTRRCHQGPIKPYQQGRQQHQGILSRVTESVKNIVPGWLQRYFNKNEDVCSCSTDTSEVPRWPENKEDHLVYADEESSNITDGRITPEPAVSNTEEPSTTSTASNYPDVLTRPSLHRSHLNFSMLESPALHCQPSTSSAFPIGSSGFSLVKEIKDSTSQHDDDNISTTSGFSSRASDKDITVSKNTSLPPLWSPEAERSHSLSQHTATSSKKPAFNLSAFGTLSPSLGNSSILKTSQLGDSPFYPGKTTYGGAAAAVRQSKLRNTPYQAPVRRQMKAKQLSAQSYGVTSSTARRILQSLEKMSSPLADAKRIPSIVSSPLNSPLDRSGIDITDFQAKREKVDSQYPPVQRLMTPKPVSIATNRSVYFKPSLTPSGEFRKTNQRIDNKCSTGYEKNMTPGQNREQRESGFSYPNFSLPAANGLSSGVGGGGGKMRRERTRFVASKPLEEERQGLTVLPKLISSSCAQAIIPSWPLKVLRLQEMEVPVLPKISLPITSSSLPTFNFSSPEITTSSPSPINSSQALTNKVQMTSPSSTGSPMFKFSSPIVKSTEANVLPPSSIGFTFSVPVAKTAELSGSSSTLEPIISSSAHHVTTVNSTNCKKTPPEDCEGPFRPAEILKEGSVLDILKSPGFASPKIDSVAAQPTATSPVVYTRPAISSFSSSGIGFGESLKAGSSWQCDTCLLQNKVTDNKCIACQAAKLSPRDTAKQTGIETPNKSGKTTLSASGTGFGDKFKPVIGTWDCDTCLVQNKPEAIKCVACETPKPGTCVKRALTLTVVSESAETMTASSSSCTVTTGTLGFGDKFKRPIGSWECSVCCVSNNAEDNKCVSCMSEKPGSSVPASSSSTVPVSLPSGGSLGLEKFKKPEGSWDCELCLVQNKADSTKCLACESAKPGTKSGFKGFDTSSSSSNSAASSSFKFGVSSSSSGPSQTLTSTGNFKFGDQGGFKIGVSSDSGSINPMSEGFKFSKPIGDFKFGVSSESKPEEVKKDSKNDNFKFGLSSGLSNPVSLTPFQFGVSNLGQEEKKEELPKSSSAGFSFGTGVINSTPAPANTIVTSENKSSFNLGTIETKSASVAPFTCKTSEAKKEEMPATKGGFSFGNVEPASLPSASVFVLGRTEEKQQEPVTSTSLVFGKKADNEEPKCQPVFSFGNSEQTKDENSSKSTFSFSMTKPSEKESEQPAKATFAFGAQTSTTADQGAAKPVFSFLNNSSSSSSTPATSAGGGIFGSSTSSSNPPVATFVFGQSSNPVSSSAFGNTAESSTSQSLLFSQDSKLATTSSTGTAVTPFVFGPGASSNNTTTSGFGFGATTTSSSAGSSFVFGTGPSAPSASPAFGANQTPTFGQSQGASQPNPPGFGSISSSTALFPTGSQPAPPTFGTVSSSSQPPVFGQQPSQSAFGSGTTPNSSSAFQFGSSTTNFNFTNNSPSGVFTFGANSSTPAASAQPSGSGGFPFNQSPAAFTVGSNGKNVFSSSGTSFSGRKIKTAVRRRK

SEQ ID NO: 3117 - protein, 590 aa, Homo sapiens
MAFPHRPDAPELPDFSMLKRLARDQLIYLLEQQHEVDKLYKVENKPALSSNEQLCFLVRPRIKNMRYIASLVNADKLAGRTRKYKVIFSPQKFYACEMVLEEEGIYGDVSCDEWAFSLLPLDVDLLSMELPEFFRDYFLEGDQRWINTVAQALHLLSTLYGPFPNCYGIGRCAKMAYELWRNLEEEEDGETKGRRPEIGHIFLLDRDVDFVTALCSQVVYEGLVDDTFRIKCGSVDFGPEVTSSDKSLKVLLNAEDKVFNEIRNEHFSNVFGFLSQKARNLQAQYDRRRGMDIKQMKNFVSQELKGLKQEHRLLSLHIGACESIMKKKTKQDFQELIKTEHALLEGFNIRESTSYIEEHIDRQVSPIESLRLMCLLSITENGLIPKDYRSLKTQYLQSYGPEHLLTFSNLRRAGLLTEQAPGDTLTAVESKVSKLVTDKAAGKITDAFSSLAKRSNFRAISKKLNLIPRVDGEYDLKVPRDMAYVFGGAYVPLSCRIIEQVLERRSWQGLDEVVRLLNCSDFAFTDMTKEDKASSESLRLILVVFLGGCTFSEISALRFLGREKGYRFIFLTTAVTNSARLMEAMSEVKA

SEQ ID NO: 3118 - protein, 61 aa, Homo sapiens
MRKGVLKDPEIADLFYKDDPEELFIGLHEIGHGSFGAVYFATNAHTSEVVAIKKMSYSGKQ

SEQ ID NO: 3119 - protein, 634 aa, Homo sapiens
MGENKDKPYLLYFNIFSCILSSNIISVAENGLQCPTPQVCVSSCPEDPWTVGKNEFSQTVGEVFYTKNRNFCLPGVPWNMTVITSLQQELCPSFLLPSAPALGRCFPWTNVTPPALPGITNDTTIQQGISGLIDSLNARDISVKIFEDFAQSWYWILVALGVALVLSLLFILLLRLVAGPLVLVLILGVLGVLAYGIYYCWEEYRVLRDKGASISQLGFTTNLSAYQSVQETWLAALIVLAVLEAILLLMLIFLRQRIRIAIALLKEASKAVGQMMSTMFYPLVTFVLLLICIAYWAMTALYLATSGQPQYVLWASNISSPGCEKVPINTSCNPTAHLVNSSCPGLMCVFQGYSSKGLIQRSVFNLQIYGVLGLFWTLNWVLALGQCVLAGAFASFYWAFHKPQDIPTFPLISAFIRTLRYHTGSLAFGALILTLVQIARVILEYIDHKLRGVQNPVARCIMCCFKCCLWCLEKFIKFLNRNAYIMIAIYGKNFCVSAKNAFMLLMRNIVRVVVLDKVTDLLLFFGKLLVVGGVGVLSFFFFSGRIPGLGKDFKSPHLNYYWLPIMTSILGAYVIASGFFSVFGMCVDTLFLCFLEDLERNNGSLDRPYYMSKSLLKILGKKNEAPPDNKKRKK

SEQ ID NO: 3120 - protein, 808 aa, Homo sapiens
MPEPGKKPVSAFSKKPRSVEVAAGSPAVFEAETERAGVKVRWQRGGSDISASNKYGLATEGTRHTLTVREVGPADQGSYAVIAGSSKVKFDLKVIEAEKAEPMLAPAPAPAEATGAPGEAPAPAAELGESAPSPKGSSSAALNGPTPGAPDDPIGLFVMRPQDGEVTVGGSITFSARVAGASLLKPPVVKWFKGKWVDLSSKVGQHLQLHDSYDRASKVYLFELHITDAQPAFTGSYRCEVSTKDKFDCSNFNLTVHEAMGTGDLDLLSAFRRTSLAGGGRRISDSHEDTGILDFSSLLKKRDSFRTPRDSKLEAPAEEDVWEILRQAPPSEYERIAFQYGVTDLRGMLKRLKGMRRDEKKSTAFQKKLEPAYQVSKGHKIRLTVELADHDAEVKWLKNGQEIQMSGSKYIFESIGAKRTLTISQCSLADDAAYQCVVGGEKCSTELFVKEPPVLITRPLEDQLVMVGQRVEFECEVSEEGAQVKWLKDGVELTREETFKYRFKKDGQRHHLIINEAMLEDAGHYALCTSGGQALAELIVQEKKLEVYQSIADLMVGAKDQAVFKCEVSDENVRGVWLKNGKELVPDSRIKVSHIGRVHKLTIDDVTPADEADYSFVPEGFACNLSAKLHFMEVKIDFVPRQEPPKIHLDCPGRIPDTIVVVAGNKLRLDVPISGDPAPTVIWQKAITQGNKAPARPAPDAPEDTGDSDEWVFDKKLLCETEGRVRVETTKDRSIFTVEGAEKEDEGVYTVTVKNPVGEDQVNLTVKVIDVPDAPAAPKISNVGEDSCTVQWEPPAYDGGQPILGAES

SEQ ID NO: 3121 - protein, 191 aa, Homo sapiens
MSSSGGAPGASASSAPPAQEEGMTWWYRWLCRLSGVLGAVSCAISGLFNCITIHPLNIAAGVWMMMAVVPIVISLTLTTLLGNAIAFATGVLYGLSALGKKAQTEAGSFAAQHPREPGPFSEGTRQAFATPAVVSGEIRMPAGAMRSPMPGSSSRGSRRMRRSSRRPWRGSCEGLGAPPSLSPLLALCGSK

SEQ ID NO: 3122 - protein, 86 aa, Homo sapiens
MGTGPAQTPRSTRAGPEPSPAPPGPGDTGDSDVTQEGSGPAGIRGAPPAWAASAREKISKMRTGTQHSPGRSRPTTVPTTGSSRRR

SEQ ID NO: 3123 - protein, 432 aa, Homo sapiens
MLALPLPPCWSGAPPGEEGESAAGPWCFQHPVSLQAGSRCTTVWKRLPRVRDGCTGRPGPGPACCAEPPAAPVSPDLNLLPGRNPPACNGFFRRSIQKNMVYTCHRDKNCIINKVTRNRCQYCRLQKCFEVGMSKEAVRNDRNKKKKEVKEEGSPDSYELSPQLEELITKVSKAHQETFPSLCQLGKYTTNSSADHRVQLDLGLWDKFSELATKCIIKIVEFAKRLPGFTGLSIADQITLLKAACLDILMLRICTRYTPEQDTMTFSDGLTLNRTQMHNAGFGPLTDLVFAFAGQLLPLEMDDTETGLLSAICLICGDRMDLEEPEKVDKLQEPLLEALRLYARRRRPSQPYMFPRMLMKITDLRGISTKGAERAITLKMEIPGPMPPLIREMLENPEMFEDDSSQPGPHPNASSEDEVPGGQGKGGLKSPA

SEQ ID NO: 3124 - protein, 242 aa, Homo sapiens
MSLGIMEEEDLAEYFRLQYGERLLQMLQKLPNVEGASESPSIWLLEKKKETEIMHQTMVQKKKMFQRRMETLNLRWEELGVKEAQLKAHIQKSEQFIQENDQKRIRAMKKANKERELKCQHMQELTKRKQEMVALRLEHQRLSAKLKDYYIFNKYLEKVVENSEESRWAHIQNTAAKKTLLLGTIKMATLNLFQIVSKHLKEVTEVALEDTHKQLDMIQQFIQDRSDIWAEVKKKEQQRVRI

SEQ ID NO: 3125 - protein, 2642 aa, Homo sapiens
MSGGAAEKQSSTPGSLFLSPPAPAPKNGSSSDSSVGEKLGAAAADAVTGRTEEYRRRRHTMDKDSRGAAATTTTTEHRFFRRSVICDSNATALELPGLPLSLPQPSIPAAVPQSAPPEPHREETVTATATSQVAQQPPAAAAPGEQAVAGPAPSTVPSSTSKDRPVSQPSLVGSKEEPPPARSGSGGGSAKEPQEERSQQQDDIEELETKAVGMSNDGRFLKFDIEIGRGSFKTVYKGLDTETTVEVAWCELQDRKLTKSERQRFKEEAEMLKGLQHPNIVRFYDSWESTVKGKKCIVLVTELMTSGTLKTYLKRFKVMKIKVLRSWCRQILKGLQFLHTRTPPIIHRDLKCDNIFITGPTGSVKIGDLGLATLKRASFAKSVIGTPEFMAPEMYEEKYDESVDVYAFGMCMLEMATSEYPYSECQNAAQIYRRVTSGVKPASFDKVAIPEVKEIIEGCIRQNKDERYSIKDLLNHAFFQEETGVRVELAEEDDGEKIAIKLWLRIEDIKKLKGKYKDNEAIEFSFDLERDVPEDVAQEMVESGYVCEGDHKTMAKAIKDRVSLIKRKREQRQLVREEQEKKKQEESSLKQQVEQSSASQTGIKQLPSASTGIPTASTTSASVSTQVEPEEPEADQHQQLQYQQPSISVLSDGTVDSGQGSSVFTESRVSSQQTVSYGSQHEQAHSTGTVPGHIPSTVQAQSQPHGVYPPSSVPQSMAHPCGGTPTYPESQIFFPTIHERPVSFSPPPTCPPKVAISQRRKSTSFLEAQTHHFQPLLRTVGQSLLPPGGSPTNWTPEAVVMLGTTASRVTGESCEIQVHPMFEPSQVYSDYRPGLVLPEEAHYFIPQEAVYVAGVHYQARVAEQYEGIPYNSSVLSSPMKQIPEQKPVQGGPTSSSVFEFPSGQAFLVGHLQNLRLDSGLGPGSPLSSISAPISTDATRLKFHPVFVPHSAPAVLTHNNESRSNCVFEFHVHTPSSSSGEGGGILPQRVYRNRQVAVDLNQEELPPQSVGLHGYLQPVTEEKHNYHAPELTVSVVEPIGQNWPIGSPEYSSDSSQITSSDPSDFQSPPPTGGAAAPFGSDVSMPFIHLPQTVLQESPLFFCFPQGTTSQQVLTASFSSGGSALHPQAQGQSQGQPSSSSLTGVSSSQPIQHPQQQQGIQQTAPPQQTVQYSLSQTSTSSEATTAQPVSQPQAPQVLPQVSAGKQGFPPRLPPQYPGDSNIAPSSNVASVCIHSTVLSPPMPTEVLATPGYFPTVVQPYVESNLLVPMGGVGGQVQVSQPGGSLAQAPTTSSQQAVLESTQGVSQVAPAEPVAVAQTQATQPTTLASSVDSAHSDVASGMSDGNENVPSSSGRHEGRTTKRHYRKSVRSRSRHEKTSRPKLRILNVSNKGDRVVECQLETHNRKMVTFKFDLDGDNPEEIATIMVNNDFILAIERESFVDQVREIIEKADEMLSEDVSVEPEGDQGLESLQGKDDYGFSGSQKLEGEFKQPIPASSMPQQIGIPTSSLTQVVHSAGRRFIVSPVPESRLRESKVFPSEITDTVAASTAQSPGMNLSHSASSLSLQQAFSELRRAQMTEGPNTAPPNFSHTGPTFPVVPPFLSSIAGVPTTAAATAPVPATSSPPNDISTSVIQSEVTVPTEEGIAGVATSTGVVTSGGLPIPPVSESPVLSSVVSSITIPAVVSISTTSPSLQVPTSTSEIVVSSTALYPSVTVSATSASAGGSTATPGPKPPAVVSQQAAGSTTVGATLTSVSTTTSFPSTASQLCIQLSSSTSTPTLAETVVVSAHSLDKTSHSSTTGLAFSLSAPSSSSSPGAGVSSYISQPGGLHPLVIPSVIASTPILPQAAGPTSTPLLPQVPSIPPLVQPVANVPAVQQTLIHSQPQPALLPNQPHTHCPEVDSDTQPKAPGIDDIKTLEEKLRSLFSEHSSSGAQHASVSLETSLVIESTVTPGIPTTAVAPSKLLTSTTSTCLPPTNLPLGTVALPVTPVVTPGQVSTPVSTTTSGVKPGTAPSKPPLTKAPVLPVGTELPAGTLPSEQLPPFPGPSLTQSQQPLEDLDAQLRRTLSPEMITVTSAVGPVSMAAPTAITEAGTQPQKGVSQVKEGPVLATSSGAGVFKMGRFQVSVAADGAQKEGKNKSEDAKSVHFESSTSESSVLSSSSPESTLVKPEPNGITIPGISSDVPESAHKTTASEAKSDTGQPTKVGRFQVTTTANKVGRFSVSKTEDKITDTKKEGPVASPPFMDLEQAVLPAVIPKKEKPELSEPSHLNGPSSDPEAAFLSRDVDDGSGSPHSPHQLSSKSLPSQNLSQSLSNSFNSSYMSSDNESDIEDEDLKLELRRLRDKHLKEIQDLQSRQKHEIESLYTKLGKVPPAVIIPPAAPLSGRRRRPTKSKGSKSSRSSSLGNKSPQLSGNLSGQSAASVLHPQQTLHPPGNIPESGQNQLLQPLKPSPSSDNLYSAFTSDGAISVPSLSAPGQGTSSTNTVGATVNSQAAQAQPPAMTSSRKGTFTDDLHKLVDNWARDAMNLSGRRGSKGHMNYEGPGMARKFSAPGQLCISMTSNLGGSAPISAASATSLGHFTKSMCPPQQYGFPATPFGAQWSGTGGPAPQPLGQFQPVGTASLQNFNISNLQKSISNPPGSNLRTT

SEQ ID NO: 3126 - protein, 2211 aa, Homo sapiens
MMPQKKRRRKKDIDFLALYEAELLNYASEDDEGELEHEYYKARVYEVVTATGDVRGAGTDANVFITLFGENGLSPKLQLTSKSKSAFEKGNVDVFRVRTNNVGLIYKVRIEHDNTGLNASWYLDHVIVTDMKRPHLRYYFNCNNWLSKVEGDRQWCRDLLASFNPMDMPRGNKYEVKVYTGDVIGAGTDADVFINIFGEYGDTGERRLENEKDNFEKGAEDRFILDAPDLGQLMKINVGHNNKGGSAGWFLSQIVIEDIGNKRKYDFPLNRWLALDEDDGKIQRDILVGGAETTAITYIVTVFTGDVRGAGTKSKIYLVMYGARGNKNSGKIFLEGGVFDRGRTDIFHIELAVLLSPLSRVSVGHGNVGVNRGWFCEKVVILCPFTGIQQTFPCSNWLDEKKADGLIERQLYEMVSLRKKRLKKFPWSLWVWTTDLKKAGTNSPIFIQIYGQKGRTDEILLNPNNKWFKPGIIEKFRIELPDLGRFYKIRVWHDKRSSGSGWHLERMTLMNTLNKDKYNFNCNRWLDANEDDNEIVREMTAEGPTVRRIMGMARYHVTVCTGELEGAGTDANVYLCLFGDVGDTGERLLYNCRNNTDLFEKGNADEFTIESVTMRNVRRVRIRHDGKGSGSGWYLDRVLVREEGQPESDNVEFPCLRWLDKDKDDGQLVRELLPSDSSATLKNFRYHISLKTGDVSGASTDSRVYIKLYGDKSDTIKQVLLVSDNNLKDYFERGRVDEFTLETLNIGNINRLVIGHDSTGMHASWFLGSVQIRVPRQGKQYTFPANRWLDKNQADGRLEVELYPSEVVEIQKLVHYEVEIWTGDVGGAGTSARVYMQIYGEKGKTEVLFLSSRSKVFERASKDTFQLEAADVGEVYKLRLGHTGEGFGPSWFVDTVWLRHLVVREVDLTPEEEARKKKEKDKLRQLLKKERLKAKLQRKKKKRKGSDEEDEGEEEESSSSEESSSEEEEMEEEEEEEEFGPGMQEVIEQHKFEAHRWLARGKEDNELVVELVPAGKPGPERNTYEVQVVTGNVPKAGTDANVYLTIYGEEYGDTGERPLKKSDKSNKFEQGQTDTFTIYAIDLGALTKIRIRHDNTGNRAGWFLDRIDITDMNNEITYYFPCQRWLAVEEDDGQLSRELLPVDESYVLPQSEEGRGGGDNNPLDNLALEQKDKSTTFSVTIKTGVKKNAGTDANVFITLFGTQDDTGMTLLKSSKTNSDKFERDSIEIFTVETLDLGDLWKVRLGHDNTGKAPGWFVDWVEVDAPSLGKCMTFPCGRWLAKNEDDGSIIRDLFHAELQTRLYTPFVPYEITLYTSDVFAAGTDANIFIIIYGCDAVCTQQKYLCTNKREQKQFFERKSASRFIVELEDVGEIIEKIRIGHNNTGMNPGWHCSHVDIRRLLPDKDGAETLTFPCDRWLATSEDDKKTIRELVPYDIFTEKYMKDGSLRQVYKEVEEPLDIVLYSVQIFTGNIPGAGTDAKVYITIYGDLGDTGERYLGKSENRTNKFERGTADTFIIEAADLGVIYKIKLRHDNSKWCADWYVEKVEIWNDTNEDEFLFLCGRWLSLKKEDGRLERLFYEKEYTGDRSSNCSSPADFWEIALSSKMADVDISTVTGPMADYVQEGPIIPYYVSVTTGKHKDAATDSRAFIFLIGEDDERSKRIWLDYPRGKRGFSRGSVEEFYVAGLDVGIIKKIEVLYEMTVWTGDVVGGGTDSNIFMTLYGINGSTEEMQLDKKKARFEREQNDTFIMEILDIAPFTKMRIRIDGLGSRPEWFLERILLKNMNTGDLTMFYYGDWLSQRKGKKTLVCEMCAVIDEEEMMEWTSYTVAVKTSDILGAGTDANVFIIIFGENGDSGTLALKQSANWNKFERNNTDTFNFPDMLSLGHLCKLRVWHDNKGIFPGWHLSYVDVKDNSRDETFHFQCDCWLSKSEGDGQTVRDFACANNKICDELEETTYEIVIETGNGGETRENVWLILEGRKNRSKEFLMENSSRQRAFRKGTTDTFEFDSIYLGDIASLCVGHLAREDRFIPKRELAWHVKTITITEMEYGNVYFFNCDCLIPLKRKRKYFKVFEVTKTTESFASKVQSLVPVKYEVIVTTGYEPGAGTDANVFVTIFGANGDTGKRELKQKMRNLFERGSTDRFFLETLELGELRKVRLEHDSSGYCSGWLVEKVEVTNTSTGVATIFNCGRWLDKKRGDGLTWRDLFPSV

SEQ ID NO: 3127 - protein, 169 aa, Homo sapiens
MKTPRCSLPDLPVLTQARRRRQAPAPTKWNKRNLSWRVRTFPRDSPLGHDTVRALMYYALKVWSDIAPLNFHEVAGSAADIQIDFSKADHNDGYPFDGPGGTVAHAFFPGHHHTAGDTHFDDDEAWTFRSSDAHGMDLFAVAVHEFGHAIGLSHVAAAHSIMRPYYQGP

SEQ ID NO: 3128 - protein, 66 aa, Homo sapiens
MAILLSYSERDPVPGGCNLEFDLDIDPNIYLEYNFFETTIKFAPANLGYARGVDPPPCDAGTDQDS

SEQ ID NO: 3129 - protein, 2358 aa, Homo sapiens
MQGPYSLNGYRVRVYRQDSATQWFTGIITHHDLFTRTMIVMNDQVLEPQNVDPSMVQMTFLDDVVHSLLKGENIGITSRRRSRANQNVNAVHSHYTRAQANSPRPAMNSQAAVPKQNTHQQQQQRSIRPNKRKGSDSSIPDEEKMKEEKYDYISRGENPKGKNKHLMNKRRKPEEDEKKLNMKRLRTDNVSDFSESSDSENSNKRIIDNSSEQKPENELKNKNTSKINGEEGKPHNNEKAGEETLKNSQPPWDQIQEDKKHEEAEKRKSVDTQLQEDMIIHSSEQSTVSDHNSNDLLPQECNMDKTHTMELLPKEKFVSRPPTPKCVIDITNDTNLEKVAQENSSTFGLQTLQKMDPNVSDSKHSIANAKFLETAKKDSDQSWVSDVVKVDLTQSSVTNASSGNDHLNMEKEKYVSYISPLSAVSVMEDKLHKRSPPPETIKSKLNTSVDTHKIKSSPSPEVVKPKITHSPDSVKSKATYVNSQATGERRLANKIEHELSRCSFHPIPTRSSTLETTKSPLIIDKNEHFTVYRDPALIGSETGANHISPFLSQHPFPLHSSSHRTCLNPGTHHPALTPAPHLLAGSSSQTPLPTINTHPLTSGPHHAVHHPHLLPTVLPGVPTASLLGGHPRLESAHASSLSHLALAHQQQQQLLQHQSPHLLGQAHPSASYNQLGLYPIIWQYPNGTHAYSGLGLPSSKWVHPENAVNAEASLRRNSPSPWLHQPTPVTSADGIGLLSHIPVRPSSAEPHRPLKITAHSSPPLTKTLVDHHKEELERKAFMEPLRSVASTSAKNDLDLNRSQTGKDCHLHRHFVDPVLNQLQRPPQETGERLNKYKEEHRRILQESIDVAPFTTKIKGLEGERENYSRVASSSSSPKSHIIKQDMDVERSVSDLYKMKHSVPQSLPQSNYFTTLSNSVVNEPPRSYPSKEVSNIYGDKQSNALAAAAANPQTLTSFITSLSKPPPLIKHQPESEGLVGKIPEHLPHQIASHSVTTFRNDCRSPTHLTVSSTNTLRSMPALHRAPVFHPPIHHSLERKEGSYSSLSPPTLTPVMPVNAGGKVQESQKPPTLIPEPKDSQANFKSSSEQSLTEMWRPNNNLSKEKTEWHVEKSSGKLQAAMASVIVRPSSSTKTDSMPAMQLASKDRVSERSSAGAHKTDCLKLAEAGETGRIILPNVNSDSVHTKSEKNFQAVSQGSVPSSVMSAVNTMCNTKTDVITSAADTTSVSSWGGSEVISSLSNTILASTSSECVSSKSVSQPVAQKQECKVSTTAPVTLASSKTGSVVQPSSGFSGTTDFIHLKKHKAALAAAQYKSSNASETEPNAIKNQTLSASLPLDSTVICSTINKANSVGNGQASQTSQPNYHTKLKKAWLTRHSEEDKNTNKMENSGNSVSEIIKPCSVNLIASTSSDIQNSVDSKIIVDKYVKDDKVNRRKAKRTYESGSESGDSDESESKSEQRTKRQPKPTYKKKQNDLQKRKGEIEEDLKPNGVLSRSAKERSKLKLQSNSNTGIPRSVLKDWRKVKKLKQTGESFLQDDSCCEIGPNLQKCRECRLIRSKKGEEPAHSPVFCRFYYFRRLSFSKNGVVRIDGFSSPDQYDDEAMSLWTHENFEDDELDIETSKYILDIIGDKFCQLVTSEKTALSWVKKDAKIAWKRAVRGVREMCDACEATLFNIHWVCQKCGFVVCLDCYKAKERKSSRDKELYAWMKCVKGQPHDHKHLMPTQIIPGSVLTDLLDAMHTLREKYGIKSHCHCTNKQNLQVGNFPTMNGVSQVLQNVLNHSNKISLCMPESQQQNTPPKSEKNGGSSPESDVGTDNKLTPPESQSPLHWLADLAEQKAREEKKENKELTLENQIKEEREQDNSESPNGRTSPLVSQNNEQGSTLRDLLTTTAGKLRVGSTDAGIAFAPVYSMGAPSSKSGRTMPNILDDIIASVVENKIPPSKTSKINVKPELKEEPEESIISAVDENNKLYSDIPHSWICEKHILWLKDYKNSSNWKLFKECWKQGQPAVVSGVHKKMNISLWKAESISLDFGDHQADLLNCKDSIISNANVKEFWDGFEEVSKRQKNKSGETVVLKLKDWPSGEDFKTMMPARYEDLLKSLPLPEYCNPEGKFNLASHLPGFFVRPDLGPRLCSAYGVVAAKDHDIGTTNLHIEVSDVVNILVYVGIAKGNGILSKAGILKKFEEEDLDDILRKRLKDSSEIPGALWHIYAGKDVDKIREFLQKISKEQGLEVLPEHDPIRDQSWYVNKKLRQRLLEEYGVRTCTLIQFLGDAIVLPAGALHQVQNFHSCIQVTEDFVSPEHLVESFHLTQELRLLKEEINYDDKLQVKNILYHAVKEMVRALKIHEDEVEDMEEN

SEQ ID NO: 3130 - protein, 947 aa, Homo sapiens
METQELRGALALLLLCFFTSASQDLQVIDLLTVGESRQMVAVAEKIRTALLTAGDIYLLSTFRLPPKQGGVLFGLYSRQDNTRWLEASVVGKINKVLVRYQREDGKVHAVNLQQAGLADGRTHTVLLRLRGPSRPSPALHLYVDCKLGDQHAGLPALAPIPPAEVDGLEIRTGQKAYLRMQGFVESMKIILGGSMARVGALSECPFQGDESIHSAGEQTKALVTQLTLFNQILVELRDDIRDQVKEMSLIRNTIMECQVCGFHEQRSHCSPNPCFRGVDCMEVYEYPGYRCGPCPPGLQGNGTHCSDINECAHADPCFPGSSCINTMPGFHCEACPRGYKGTQVSGVGIDYARASKQVCNDIDECNDGNNGGCDPNSICTNTVGSFKCGPCRLGFLGNQSQGCLPARTCHSPAHSPCHIHAHCLFERNGAVSCQCNVGWAGNGNVCGTDTDIDGYPDQALPCMDNNKHCKQDNCLLTPNSGQEDADNDGVGDQCDDDADGDGIKNVEDNCRLFPNKDQQNSDTDSFGDACDNCPNVPNNDQKDTDGNGEGDACDNDVDGDGIPNGLDNCPKVPNPLQTDRDEDGVGDACDSCPEMSNPTQTDADSDLVGDVCDTNEDSDGDGHQDTKDNCPQLPNSSQLDSDNDGLGDECDGDDDNDGIPDYVPPGPDNCRLVPNPNQKDSDGNGVGDVCEDDFDNDAVVDPLDVCPESAEVTLTDFRAYQTVVLDPEGDAQIDPNWVVLNQGMEIVQTMNSDPGLAVGYTAFNGVDFEGTFHVNTVTDDDYAGFLFSYQDSGRFYVVMWKQTEQTYWQATPFRAVAQPGLQLKAVTSVSGPGEHLRNALWHTGHTPDQVRLLWTDPRNVGWRDKTSYRWQLLHRPQVGYIRVKLYEGPQLVADSGVIIDTSMRGGRLGVFCFSQENIIWSNLQYRCNDTVPEDFEPFRRQLLQGRV

SEQ ID NO: 3131 - protein, 570 aa, Homo sapiens
MAKTPSDHLLSTLEELVPYDFEKFKFKLQNTSVQKEHSRIPRSQIQRARPVKMATLLVTYYGEEYAVQLTLQVLRAINQRLLAEELHRAAIQGRPPDTAASPRCHAQEGDPVDGTCVRDSCSFPEAVSGHPQASGSRSPGCPRCQDSHERKSPGSLSPQPLPQCKRHLKQVQLLFCEDHDEPICLICSLSQEHQGHRVRPIEEVALEHKKKIQKQLEHLKKLRKSGEEQRSYGEEKAVSFLKQTEALKQRVQRKLEQVYYFLEQQEHFFVASLEDVGQMVGQIRKAYDTRVSQDIALLDALIGELEAKECQSEWELLQDIGDILHRAKTVPVPEKWTTPQEIKQKIQLLHQKSEFVEKSTKYFSETLRSEMEMFNVPELIGAQAHAVNVILDAETAYPNLIFSDDLKSVRLGNKWERLPDGPQRFDSCIIVLGSPSFLSGRRYWEVEVGDKTAWILGACKTSISRKGNMTLSPENGYWVVIMMKENEYQASSVPPTRLLIKEPPKRVGIFVDYRVGSISFYNVTARSHIYTFASCSFSGPLQPIFSPGTRDGGKNTAPLTICPVGGQGPD

SEQ ID NO: 3132 - protein, 114 aa, Homo sapiens
PSILLKGLSCQGRTHIHLAPGLPGDPGIISGMRSHCEIAVFIDGPLALADGIPFFRSANGVILTPGNTDGFLLPKYFKEALQLRPTRENHHPSPYSLFLKAVPFCPHLSPSFQP

SEQ ID NO: 3133 - protein, 1299 aa, Homo sapiens
MQQAPQPYEFFSEENSPKWRGLLVSALRKVQEQVHPTLSANEESLYYIEELIFQLLNKLCMAQPRTVQDVEERVQKTFPHPIDKWAIADAQSAIEKRKRRNPLLLPVDKIHPSLKEVLGYKVDYHVSLYIVAVLEYISADILKLAGNYVFNIRHYEISQQDIKVSMCADKVLMDMFDQDDIGLVSLCEDEPSSSGELNYYDLVRTEIAEERQYLRELNMIIKVFREAFLSDRKLFKPSDIEKIFSNISDIHELTVKLLGLIEDTVEMTDESSPHPLAGSCFEDLAEEQAFDPYETLSQDILSPEFHEHFNKLMARPAVALHFQQLKACSEEQEDRECLNQAITALMNLQGSMDRIYKQYSPRRRPGDPVCPFYSHQLRSKHLAIKKMNEIQKNIDGWEGKDIGQCCNEFIMEGPLTRIGAKHERHIFLFDGLMISCKPNHGQTRLPGYSSAEYRLKEKFVMRKIQICDKEDTCEHKHAFELVSKDENSIIFAAKSAEEKNNWMAALISLHYRSTLDRMLDSVLLKEENEQPLRLPSPEVYRFVVKDSEENIVFEDNLQSRSGIPIIKGGTVVKLIERLTYHMYADPNFVRTFLTTYRSFCKPQELLSLLIERFEIPEPEPTDADKLAIEKGEQPISADLKRFRKEYVQPVQLRILNVFRHWVEHHFYDFERDLELLERLESFISSVRGKAMKKWVESIAKIIRRKKQAQANGVSHNITFESPPPPIEWHISKPGQFETFDLMTLHPIEIARQLTLLESDLYRKVQPSELVGSVWTKEDKEINSPNLLKMIRHTTNLTLWFEKCIVEAENFEERVAVLSRIIEILQVFQDLNNFNGVLEIVSAVNSVSVYRLDHTFEALQERKRKILDEAVELSQDHFKKYLVKLKSINPPCVPFFGIYLTNILKTEEGNNDFLKKKGKDLINFSKRRKVAEITGEIQQYQNQPYCLRIEPDMRRFFENLNPMGSASEKEFTDYLFNKSLEIEPRNCKQPPRFPRKSTFSLKSPGIRPNTGRHGSTSGTLRGHPTPLEREPCKISFSRIAETELESTVSAPTSPNTPSTPPVSASSDLSVFLDVDLNSSCGSNSIFAPVLLPHSKSFFSSCGSLHKLSEEPLIPPPLPPRKKFDHDASNSKGNMKSDDDPPAIPPRQPPPPKVKPRVPVPTGAFDGPLHSPPPPPPRDPLPDTPPPVPLRPPEHFINCPFNLQPPPLGHLHRDSDWLRDISTCPNSPSTPPSTPSPRVPRRCYVLSSSQNNLAHPPAPPVPPRQNSSPHLPKLPPKTYKRELSHPPLYRLPLLENAETPQ

SEQ ID NO: 3134 - protein, 128 aa, Homo sapiens
MAAGTAVGAWVLVLSLWGAVVGAQNITARIGEPLVLKCKGAPKKPPQRLEWKLNTGRTEAWKVLSPQGGGPWDSVARVLPNGSLFLPAVGIQDEGIFRCQAMNRNGKETKSNYRVRVYQFENLHNYSL

SEQ ID NO: 3135 - protein, 194 aa, Homo sapiens
MAAAALPAWLSLQSRARTLRAFSTAVYSATPVPTPSLPERTPGNERPPRRKALPPRTEKMAVDQDWPSVYPVAAPFKPSAVPLPVRMGYPVKKGVPMAKEGNLELLKIPNFLHLTPVAIKKHCEALKDFCTEWPAALDSDEKCEKHFPIEIDSTDYVSSGPSVRNPRARVVVLRVPFKEAELRLCSVSTNSVIP

SEQ ID NO: 3136 - protein, 119 aa, Homo sapiens
MVSKLSQLQTELLAALLESGLSKEALIQALGEPGPYLLAGEGPLDKGESCGGGRGELAELPNGLGETRGSEDETDDDGEDFTPPILKELENLSPEEAAHQKAVVETLLQVHPCRAGRAD

SEQ ID NO: 3137 - protein, 570 aa, Homo sapiens
MAEPQAESEPLLGGARGGGGDWPAGLTTYRSIQVGPGAAARWDLCIDQAVVFIEDAIQYRSINHRVDASSMWLYRRYYSNVCQRTLSFTIFLILFLAFIETPSSLTSTADVRYRAAPWEPPCGLTESVEVLCLLVFAADLSVKGYLFGWAHFQKNLWLLGYLVVLVVSLVDWTVSLSLVCHEPLRIRRLLRPFFLLQNSSMMKKTLKCIRWSLPEMASVGLLLAIHLCLFTMFGMLLFAGGKQDDGQDRERLTYFQNLPESLTSLLVLLTTANNPDVMIPAYSKNRAYAIFFIVFTVIGSLFLMNLLTAIIYSQFRGYLMKSLQTSLFRRRLGTRAAFEVLSSMVGEGGAFPQAVGVKPQNLLQVLQKVQLDSSHKQAMMEKVRSYGSVLLSAEEFQKLFNELDRSVVKEHPPRPEYQSPFLQSAQFLFGHYYFDYLGNLIALANLVSICVFLVLDADVLPAERDDFILGILNCVFIVYYLLEMLLKVFALGLRGYLSYPSNVFDGLLTVVLLNFLHKWDPRSHLQPLAGTPEATYQMTVELLFRDILEEPGEDELTERLSQHPHLWLCR

SEQ ID NO: 3138 - protein, 2717 aa, Homo sapiens
MPRTKQIHPRNLRDKIEEAQKELNGAEVSKKEILQAGVKGTSESLKGVKRKKIVAENHLKKIPKSPLRNPLQAKHKQNTEESSFAVLHSASESHKKQNYIPVKNGKQFTKQNGETPGIIAEASKSEESVSPKKPLFLQQPSELRRWRSEGADPAKFSDLDEQCDSSSLSSKTRTDNSECISSHCGTTSPSYTNTAFDVLLKAMEPELSTLSQKGSPCAIKTEKLRPNKTARSPPKLKNSSMDAPNQTSQELVAESQSSCTSYTVHMSAAQKNEQGAMQSASHLYHQHEHFVPKSNQHNQQLPGCSGFTGSLTNLQNQENAKLEQVYNIAVTSSVGLTSPSSRSQVTPQNQQMDSASPLSISPANSTQSPPMPIYNSTHVASVVNQSVEQMCNLLLKDQKPKKQGKYICEYCNRACAKPSVLLKHIRSHTGERPYPCVTCGFSFKTKSNLYKHKKSHAHTIKLGLVLQPDAGGLFLSHESPKALSIHSDVEDSGESEEEGATDERQHDLGAMELQPVHIIKRMSNAETLLKSSFTPSSPENVIGDFLLQDRSAESQAVTELPKVVVHHVTVSPLRTDSPKAMDPKPELSSAQKQKDLQVTNVQPLSANMSQGGVSRLETNENSHQKGDMNPLEGKQDSHVGTVHAQLQRQQATDYSQEQQGKLLSPRSLGSTDSGYFSRSESADQTVSPPTPFARRLPSTEQDSGRSNGPSAALVTTSTPSALPTGEKALLLPGQMRPPLATKTLEERISKLISDNEALVDDKQLDSVKPRRTSLSRRGSIDSPKSYIFKDSFQFDLKPVGRRTSSSSDIPKSPFTPTEKSKQVFLLSVPSLDCLPITRSNSMPTTGYSAVPANIIPPPHPLRGSQSFDDKIGAFYDDVFVSGPNAPVPQSGHPRTLVRQAAIEDSSANESHVLGTGQSLDESHQGCHAAGEAMSVRSKALAQGPHIEKKKSHQGRGTMFECETCRNRYRKLENFENHKKFYCSELHGPKTKVAMREPEHSPVPGGLQPQILHYRVAGSSGIWEQTPQIRKRRKMKSVGDDEELQQNESGTSPKSSEGLQFQNALGCNPSLPKHNVTIRSDQQHKNIQLQNSHIHLVARGPEQTMDPKLSTIMEQQISSAAQDKIELQRHGTGISVIQHTNSLSRPNSFDKPEPFERASPVSFQELNRTGKSGSLKVIGISQEESHPSRDGSHPHQLALSDALRGELQESSRKSPSERHVLGQPSRLVRQHNIQVPEILVTEEPDRDLEAQCHDQEKSEKFSWPQRSETLSKLPTEKLPPKKKRLRLAEIEHSSTESSFDSTLSRSLSRESSLSHTSSFSASLDIEDVSKTEASPKIDFLNKAEFLMIPAGLNTLNVPGCHREMRRTASEQINCTQTSMEVSDLRSKSFDCGSITPPQTTPLTELQPPSSPSRVGVTGHVPLLERRRGPLVRQISLNIAPDSHLSPVHPTSFQNTALPSVNAVPYQGPQLTSTSLAEFSANTLHSQTQVKDLQAETSNSSSTNVFPVQQLCDINLLNQIHAPPSHQSTQLSLQVSTQGSKPDKNSVLSGSSKSEDCFAPKYQLHCQVFTSGPSCSSNPVHSLPNQVISDPVGTDHCVTSATLPTKLIDSMSNSHPLLPPELRPLGSQVQKVPSSFMLPIRLQSSVPAYCFATLTSLPQILVTQDLPNQPICQTNHSVVPISEEQNSVPTLQKGHQNALPNPEKEFLCENVFSEMSQNSSLSESLPITQKISVGRLSPQQESSASSKRMLSPANSLDIAMEKHQKRAKDENGAVCATDVRPLEALSSRVNEASKQKKPILVRQVCTTEPLDGVMLEKDVFSQPEISNEAVNLTNVLPADNSSTGCSKFVVIEPISELQEFENIKSSTSLTLTVRSSPAPSENTHISPLKCTDNNQERKSPGVKNQGDKVNIQEQSQQPVTSLSLFNIKDTQQLAFPSLKTTTNFTWCYLLRQKSLHLPQKDQKTSAYTDWTVSASNPNPLGLPTKVALALLNSKQNTGKSLYCQAITTHSKSDLLVYSSKWKSSLSKRALGNQKSTVVEFSNKDASEINSEQDKENSLIKSEPRRIKIFDGGQSNEEYVYVRGRGRGKYICEECGIRCKKPSMLKKHIRTHTDVRPYHCTYCNFSFKTKGNLTKHMKSKAHSKKCVDLGVSVGLIDEQDTEESDEKQRFSYERSGYDLEESDGPDEDDNENEDDDEDSQAESVLSATPSVTASPQHLPSRSSLQDPVSTDEDVRITDCFSGVHTDPMDVLPRALLTRMTVLSTAQSDYNRKTLSPGKARQRAARDENDTIPSVDTSRSPCHQMSVDYPESEEILRSSMAGKAVAITQSPSSVRLPPAAAEHSPQTAAGMPSVASPHPDPQEQKQQITLQPTPGLPSPHTHLFSHLPLHSQQQSRTPYNMVPVGGIHVVPAGLTYSTFVPLQAGPVQLTIPAVSVVHRTLGTHRNTVTEVSGTTNPAGVAELSSVVPCIPIGQIRVPGLQNLSTPGLQSLPSLSMETVNIVGLANTNMAPQVHPPGLALNAVGLQVLTANPSSQSSPAPQAHIPGLQILNIALPTLIPSVSQVAVDAQGAPEMPASQSKACETQPKQTSVASANQVSRTESPQGLPTVQRENAKKVLNPPAPAGDHARLDGLSKMDTEKAASANHVKPKPELTSIQGQPASTSQPLLKAHSEVFTKPSGQQTLSPDRQVPRPTALPRRQPTVHFSDVSSDDDEDRLVIAT

SEQ ID NO: 3139 - protein, 361 aa, Homo sapiens
MDDDDFGGFEAAETFDGGSGETQTTSPAIPWAAFPAVSGVHLSPSSPEIVLDRDHSSSIGCLSSDAIISSPENTHAANSIVSQTIPKAQIQQSTHTHLDISLFPLGLTDEKSNGTIALVDDSEDPGANVSNIQLQQKISSLEIKLKVSEEEKQRIKQDVESLMEKHNVLEKGFLKEKEQEAISFQDRYKELQEKHKQELEDMRKAGHEALSIIVDEYKALLQSSVKQQVEAIEKQYISAIEKQAHKCEELLNAQHQRLLEMLDTEKELLKEKIKEALIQQSQEQKEILEKCLEEERQRNKEALVSAAKLEKEAVKDAVLKVVEEERKNLEKAHAEERELWKTEHAKDQEKVSQEIQKAIQE

SEQ ID NO: 3140 - protein, 286 aa, Homo sapiens
MAGMKTASGDYIDSSWELRVFVGEEDPEAESVTLRVTGESHIGGVLLKIVEQINRKQDWSDHAIWWEQKRQWLLQTHWTLDKYGILADARLFFGPQHRPVILRLPNRRALRLRASFSQPLFQAVAAICRLLSIRHPEELSLLRAPEKKEKKKKEKEPEEELYDLSKVVLAGGVAPALFRGMPAHFSDSAQTEACYHMLSRPQPPPDPLLLQRLPRPSSLSDKTQLHSRWLDSSRCLMQQGIKAGDALWLRFKYYSFFDLDPKTDPVRLTQLYEQARWDLLLEEIDC

SEQ ID NO: 3141 - protein, 342 aa, Homo sapiens
MLQGHSSVFQALLGTFFTWGMTAAGAALVFVFSSGQRRILDGSLGFAAGVMLAASYWSLLAPAVEMATSSGGFGAFAFFPVAVGFTLGAAFVYLADLLMPHLGAAEDPQTTLALNFGSTLMKKKSDPEGPALLFPESELSIRIGRAGLLSDKSENGEAYQRKKAAATGLPEGPAVPVPSRGNLAQPGGSSWRRIALLILAITIHNVPEGLAVGVGFGAIEKTASATFESARNLAIGIGIQNFPEGLAVSLPLRGAGFSTWRAFWYGQLSGMVEPLAGVFGAFAVVLAEPILPYALAFAAGAMVYVVMDDIIPEAQISGNGKLASWASILGFVVMMSLDVGLG

SEQ ID NO: 3142 - protein, 1178 aa, Homo sapiens
MGQDAEDTSEEPPEKEELAGVQEAETATDCPEVLEEGCEEATGVTGGEQVDLSEPPDHEKKTNQEVAAATLEDHAQDESAEESCQIVPFENDCMEDFVTSLTGSPYEFFPTESTSFCSESCSPLSESAKGLESEQAPKLGLRAEENPMVGALCGQCGSLQGGAAEGPAAPDVVVVLEEEALDDALANPYVMGVGLPGQAAPGEGGQAASDALGGYGSKEELNCEAEGGLVPADRKNTSTRVRPHSGKVAGYVPETVPEETGPEAGSSAPGIGGAAEEVGKTLLSLEGKPLEASRALPAKPRAFTLYPRSFSVEGREIPVSVYQEPEGSGLDDHRIKRKEDNLSLSCVIGSSGSFSQRNHLPSSGTSTPSSMVDIPPPFDLACITKKPITKSSPSLLIESDSPDKYKKKKSSFKRFLALTFKKKTENKLHVDVNVSSSRSSSESSYHGPSRILEVDRRSLSNSPQLKSRTGKLRASESPSSLIFYRDGKRKGVPFSRTVSRVESFEDRSRPPFLPLPLTKPRSISFPSADTSDYENIPAMNSDYENIQIPPRRPARAGAFTKLFEDQSRALSTANENDGYVDMSSFNAFESKQQSADQDAESAYTEPYKVCPISSAAPKEDLTSDEEQRSSEEEDSASRDPSVTHKVEGQSRALVIAQELLSSEKAYVEMLQHLNLDFHGAVMRALDDMDHEGRDTLAREELRQGLSELPAIHDLHQGILEELEERLSNWESQQKVADVFLAREQGFDHHATHILQFDRYLGLLSENCLHSPRLAAAVREFEQSVQGGSQTAKHRLLRVVQRLFQYQVLLTDYLNNLCPDSAEYDNTQGALSLISKVTDRANDSMEQGENLQKLVHIEHSVRGQGDLLQPGREFLKEGTLMKVTGKNRRPRHLFLMNDVLLYTYPQKDGKYRLKNTLAVANMKVSRPVMEKVPYALKIETSESCLMLSASSCAERDEWYGCLSRALPEDYKAQALAAFHHSVEIRERLGVSLGERPPTLVPVTHVMMCMNCGCDFSLTLRRHHCHACGKIVCRNCSRNKYPLKYLKDRMAKVCDGCFGELKKRGRAVPGLMRERPVSMSFPLSSPRFSGSAFSSVFQSINPSTFKKQKKVPSALTEDKVALESMPLLGFTIAPEKEEGSSEVGPIFHLYHKKTLFYSFKAEDTNSAQRWIEAMEDASVL

SEQ ID NO: 3143 - protein, 484 aa, Homo sapiens
MNRKDSKRKSHQECTGKIGGRGRPRQVRRHKTCPSPREISKVMASMNLGLLSEGGCSEDELLEKCIQSFDSAGSLCHEDHMLNMVLAMHSWVLPSADLAARLLTSYQKATGDTQELRRLQICHLVRYWLMRHPEVMHQDPQLEEVIGRFWATVAREGNSAQRRLGDSSDLLSPGGPGPPLPMSSPGLGKKRKVSLLFDHLETGELAQHLTYLEFRSFQAITLSLDLFYTEDEIYELSYAREPRCPKSLPPSPFNAPLVVEWAPGVTPKPDRVTLGRHVEQLVESVFKNYDPEGRGTISQEDFERLSGNFPFACHGLHPPPRQGRGSFSREELTGYLLRASAICSKLGLAFLHTFHEVTFRKPTFCDSCSGFLWGVTKQGYRCRECGLCCHKHCRDQVKVECKKRPGAKGDAGPPGAPVPSTPAPHASCGSEENHSYTLSLEPETGCQLRHAWTQTESPHPSWETDTVPCPVMDPPSTASSKLDS

SEQ ID NO: 3144 - protein, 264 aa, Homo sapiens
MGEMEQLRQEAEQLKKQIADARKACADVTLAELVSGLEVVGRVQMRTRRTLRGHLAKIYAMHWATDSKLLVSASQDGKLIVWDSYTTNKVHAIPLRSSWVMTCAYAPSGNFVACGGLDNMCSIYNLKSREGNVKVSRELSAHTGYLSCCRFLDDNNIVTSSGDTTCAKLWDVREGTCRQTFTGHESDINAICFFPNGEAICTGSDDASCRLFDLRADQELICFSHESIICGITSVAFSLSGRLLFAGYDDFNCNVWDSMKSERV

SEQ ID NO: 3145 - protein, 338 aa, Homo sapiens
DRAQVHTREPTTYPPVLSERAFLRGSLTLESSTSSDSRLGRARDEEGLLEMQKGKVTPETDLHKETHLGKVSLEGEGLGTDDGLHSRALQEWLSADVLHECDSQQPGKDALIHAGTNPYKCKQCGKGFNRKWYLVRHQRVHTGMKPYECNACGKAFSQSSTLIRHYLIHTGEKPYKCLECGKAFKRRSYLMQHHPIHTGEKPYECSQCRKAFTHRSTFIRHNRTHTGEKPFECKECEKAFSNRAHLIQHYIIHTGEKPYDCMACGKAFRCSSELIQHQRIHTGEKPYECTQCGKAFHRSTYLIQHSVIHTGEMPYKCIECGKAFKRRSHLLQHQRVHT

SEQ ID NO: 3146 - protein, 485 aa, Homo sapiens
MESSKKMDSPGALQTNPPLKLHTDRSAGTPVFVPEQGGYKEKFVKTVEDKYKCEKCHLVLCSPKQTECGHRFCESCMAALLSSSSPKCTACQESIVKDKVFKDNCCKREILALQIYCRNESRGCAEQLMLGHLLVHLKNDCHFEELPCVRPDCKEKVLRKDLRDHVEKACKYREATCSHCKSQVPMIALQVSLLQNESVEKNKSIQSLHNQICSFEIEIERQKEMLRNNESKILHLQRVIDSQAEKLKELDKEIRPFRQNWEEADSMKSSVESLQNRVTELESVDKSAGQVARNTGLLESQLSRHDQMLSVHDIRLADMDLRFQVLETASYNGVLIWKIRDYKRRKQEAVMGKTLSLYSQPFYTGYFGYKMCARVYLNGDGMGKGTHLSLFFVIMRGEYDALLPWPFKQKVTLMLMDQGSSRRHLGDAFKPDPNSSSFKKPTGEMNIASGCPVFVAQTVLENGTYIKDDTIFIKVIVDTSDLPDP

SEQ ID NO: 3147 - protein, 91 aa, Homo sapiens
MDDDDFGGFEAAETFDGGSGETQTTSPAIPWAAFPAVSGVHLSPSSPEIVLDRDHSSSIGCLSSDAIISSPENTHAANSIVSQTIPKAQIQ

SEQ ID NO: 3148 - protein, 512 aa, Homo sapiens
MLLPAPALRRALLSRPWTGAGLRWKHTSSLKVANEPVLAFTQGSPERDALQKALKDLKGRMEAIPCVVGDEEVWTSDVQYQVSPFNHGHKVAKFCYADKSLLNKAIEAALAARKEWDLKPIADRAQIFLKAADMLSGPRRAEILAKTMVGQGKTVIQAEIDAAAELIDFFRFNAKYAVELEGQQPISVPPSTNSTVYRGLEGFVAAISPFNFTAIGGNLAGAPALMGNVVLWKPSDTAMLASYAVYRILREAGLPPNIIQFVPADGPLFGDTVTSSEHLCGINFTGSVPTFKHLWKQVAQNLDRFHTFPRLAGECGGKNFHFVHRSADVESVVSGTLRSAFEYGGQKCSACSRLYVPHSLWPQIKGRLLEEHSRIKVGDPAEDFGTFFSAVIDAKEIFGPVLSVYVYPDDKYKETLQLVDSTTSYGLTGAVFSQDKDVVQEATKVLRNAAGNFYINDKSTGSIVGQQPFGGARASGTNDKPGGPHYILRWTSPQVIKETHKPLGDWSYAYMQ

SEQ ID NO: 3149 - protein, 81 aa, Homo sapiens
MDGKVAVQECGPPAVSWVPEEGEKLDQEDEDQEPSSSPTSSSSLSAASRCSSWRWRWANTPAKGVSQPGGRSAPSSRALVW

SEQ ID NO: 3150 - protein, 930 aa, Homo sapiens
MSEFRIHHDVNELLSLLRVHGGDGAEVYIDLLQKNRTPYVTTTVSAHSAKVKIAEFSRTPEDFLKKYDELKSKNTRNLDPLVYLLSKLTEDKETLQYLQQNAKERAELAAAAVGSSTTSINVPAAASKISMQELEELRKQLGSVATGSTLQQSLELKRKMLRDKQNKKNSGQHLPIFPAWVYERPALIGDFLIGAGISTDTALPIVLLRWNLALSPRLKCSGVISAHCNLHLPGTLPLASQESAVVEDLLYVLVGVDGRYVSAQPLAGRQSRTFLVDPNLDLSIRELVHRILPVAASYSAVTRFIEEKSSFEYGQVNHALAAAMRTLVKEHLILVSQLEQLHRQGLLSLQKLWFYIQPAMRTMDILASLATSVDKGECLGGSTLSLLHDRSFSYTGDSQAQELCLYLTKAASAPYFEVLEKWIYRGIIHDPYSEFMVEEHELRKERIQEDYNDKYWDQRYTIVQQQIPSFLQKMADKILSTGKYLNVVRECGHDVTCPVAKEIIYTLKERAYVEQIEKAFNYASKVLLDFLMEEKELVAHLRSIKRYFLMDQGDFFVHFMDLAEEELRKPVEDITPPRLEALLELALRMSTANTDPFKDDLKIDLMPHDLITQLLRVLAIETKQEKAMAHADPTELALSGLEAFSFDYIVKWPLSLIINRKALTRYQMLFRHMFYCKHVERQLCSVWISNKTAKQHSLHSAQWFAGAFTLRQRMLNFVQNIQYYMMFEVMEPTWHILEKNLKSASNIDDVLGHHTGFLDTCLKDCMLTNPELLKVFSKLMSVCVMFTNCMQKFTQSMKLDGELGGQTLEHSTVLGLPAGAEERARKELARKHLAEHADTVQLVSGFEATINKFDKNFSAHLLDLLARLSIYSTSDCEHGMASVISRLDFNGFYTERLERLSAERSQKATPQVPVLRGPPAPAPRVAVTAQ

SEQ ID NO: 3151 - protein, 49 aa, Homo sapiens
MASSTSLPAPGSRPKKPLGKMADWFRQTLLKKPKKRPGSLTYLTLHYLS

SEQ ID NO: 3152 - protein, 422 aa, Homo sapiens
MAETKDAAQMLVTFKDVAVTFTREEWRQLDLAQRTLYREVMLETCGLLVSLGHRVPKPELVHLLEHGQELWIVKRGLSHATCAGDRAQVHTREPTTYPPVLSERAFLRGSLTLESSTSSDSRLGRARDEEGLLEMQKGKVTPETDLHKETHLGKVSLEGEGLGTDDGLHSRALQEWLSADVLHECDSQQPGKDALIHAGTNPYKCKQCGKGFNRKWYLVRHQRVHTGMKPYECNACGKAFSQSSTLIRHYLIHTGEKPYKCLECGKAFKRRSYLMQHHPIHTGEKPYECSQCRKAFTHRSTFIRHNRTHTGEKPFECKECEKAFSNRAHLIQHYIIHTGEKPYDCMACGKAFRCSSELIQHQRIHTGEKPYECTQCGKAFHRSTYLIQHSVIHTGEMPYKCIECGKAFKRRSHLLQHQRVHT

SEQ ID NO: 3153 - protein, 196 aa, Homo sapiens
RHPLACRRRSWRAAGEAADKVVLHTGKYEELIVCSHEIAASTAQLVAASKVKANKHSPHLSRLQECSRTVNERAANVVASTKSGQEQIEDRDTMDFSGLSLIKLKKQEMETQVRVLELEKTLEAERMRLGELRKQHYVLAGASGSPGEEVAIRPSTAPRSVTTKKPPLAQKPSVAPRQDHQLDKKDGIYPAQLVNY

SEQ ID NO: 3154 - protein, 1105 aa, Homo sapiens
MLQSALLSTRKHLYGLFHYNPMMLGLESLPDPTDTWEIIETIGKGTYGKVYKVTNKRDGSLAAVKILDPVSDMDEEIEAEYNILQFLPNHPNVVKFYGMFYKADHCVGGQLWLVLELCNGGSVTELVKGLLRCGQRLDEAMISYILYGALLGLQHLHNNRIIHRDVKGNNILLTTEGGVKLVDFGVSAQLTSTRLRRNTSVGTPFWMAPEVIACEQQYDSSYDARCDVWSLGITAIELGDGDPPLFDMHPVKTLFKIPRNPPPTLLHPEKWCEEFNHFISQCLIKDFERRPSVTHLLDHPFIKGVHGKVLFLQKQLAKVLQDQKHQNPVAKTRHERMHTRRPYHVEDAEKYCLEDDLVNLEVLDEDTIIHQLQKRYADLLIYTYVGDILIALNPFQNLSIYSPQFSRLYHGVKRASNPPHIFASADAAYQCMVTLSKDQCIVISGESGSGKTESAHLIVQHLTFLGKANNQTLREKILQVNSLVEAFGNSCTAINDNSSRFGKYLEMMFTPTGVVMGARISEYLLEKSRVIKQAAREKNFHIFYYIYAGLHHQKKLSDFRLPEEKPPRYIADETGRVMHDITSKESYRRQFEAIQHCFRIIGFTDKEVHSVYRILAGILNIGNIEFAAISSQHQTDKSEVPNAEALQNAASVLCISPEELQEALTSHCVVTRGETIIRANTVDRAADVRDAMSKALYGRLFSWIVNRINTLLQPDENICSAGGGMNVGILDIFGFENFQRNSFEQLCINIANEQIQYYFNQHVFALEQMEYQNEGIDAVPVEYEDNRPLLDMFLQKPLGLLALLDEESRFPQATDQTLVDKFEDNLRCKYFWRPKGVELCFGIQHYAGKVLYDASGVLEKNRDTLPADVVVVLRTSENKLLQQLFSIPLTKTGNLAQTRARITVASSSLPPHFSAGKAKVDTLEVIRHPEETTNMKRQTVASYFRYSLMDLLSKMVVGQPHFVRCIKPNDDREALQFSRERVLAQLRSTGILETVSIRRQGYSHRILFEEFVKRYYYLAFTAHQTPLASKESCVAILEKSRLDHWVLGKTKVFLKYYHVEQLNLLLREVIGRVVVLQAYTKGWLGARRYKRVREKREKGAIAIQS

SEQ ID NO: 3155 - protein, 241 aa, Homo sapiens
MFRSDRMWSCHWKWKPSPLLFLFALYIMCVPHSVWGCANCRVVLSNPSGTFTSPCYPNDYPNSQACMWTLRAPTGYIIQITFNDFDIEEAPNCIYDSLSLDNGESQTKFCGATAKGLSFNSSANEMHVSFSSDFSIQKKGFNASYIRVAVSLRNQKVILPQTSDAYQVSVAKSISIPELSAFTLCFEATKVGHEDSDWTAFSYSNASFTQLLSFGKAKSGYFLSISDSKCLLNNALPVKEK

SEQ ID NO: 3156 - protein, 145 aa, Homo sapiens
MAESLRSPRRSLYKLVGSPPWKEAFRQRCLERMRNSRDRLLNRYRQAGSSGPGNSQNSFLVQEVMEEEWNALQSVENCPEDLAQLEELIDMAVLEEIQQELINQEQSIISEYEKSLQFDEKCLSIMLAEWEANPLICPVCTNLLS

SEQ ID NO: 3157 - protein, 835 aa, Homo sapiens
MSLKPQQQQQQQQQQQQQQQQQQQQQQQPPPAAANVRKPGGSGLLASPAAAPSPSSSSVSSSSATAPSSVVAATSGGGRPGLGRGRNSNKGLPQSTISFDGIYANMRMVHILTSVVGSKCEVQVKNGGIYEGVFKTYSPKCDLVLDAAHEKSTESSSGPKREEIMESILFKCSDFVVVQFKDMDSSYAKRDAFTDSAISAKVNGEHKEKDLEPWDAGELTANEELEALENDVSNGWDPNDMFRYNEENYGVVSTYDSSLSSYTVPLERDNSEEFLKREARANQLAEEIESSAQYKARVALENDDRSEEEKYTAVQRNSSEREGHSINTRENKYIPPGQRNREVISWGSGRQNSPRMGQPGSGSMPSRSTSHTSDFNPNSGSDQRVVNGGVPWPSPCPSPSSRPPSRYQSGPNSLPPRAATPTRPPSRPPSRPSRPPSHPSAHGSPAPVSTMPKRMSSEGPPRMSPKAQRHPRNHRVSAGRGSISSGLEFVSHNPPSEAATPPVARTSPSGGTWSSVVSGVPRLSPKTHRPRSPRQNSIGNTPSGPVLASPQAGIIPTEAVAMPIPAASPTPASPASNRAVTPSSEAKDSRLQDQRQNSPAGNKENIKPNETSPSFSKAENKGISPVVSEHRKQIDDLKKFKNDFRLQPSSTSESMDQLLNKNREGEKSRDLIKDKIEPSAKDSFIENSSSNCTSGSSKPNSPSISPSILSNTEHKRGPEVTSQGVQTSSPACKQEKDDKEEKKDAAEQVRKSTLNPNAKEFNPRSFSQPKPSTTPTSPRPQAQPSPSMVGHQQPTPVYTQPVCFAPNMMYPVPVSPGVQYQICPNSGKTSIIRVP

SEQ ID NO: 3158 - protein, 1313 aa, Homo sapiens
MRSAAAAPRSPAVATESRRFAAARWPGWRSLQRPARRSGRGGGGAAPGPYPSAAPPPPGPGPPPSRQSSPPSASDCFGSNGNGGGAFRPGSRRLLGLGGPPRPFVVLLLPLASPGAPPAAPTRASPLGARASPPRSGVSLARPAPGCPRPACEPVYGPLTMSLKPQQQQQQQQQQQQQQQQQQQQQQQPPPAAANVRKPGGSGLLASPAAAPSPSSSSVSSSSATAPSSVVAATSGGGRPGLGRGRNSNKGLPQSTISFDGIYANMRMVHILTSVVGSKCEVQVKNGGIYEGVFKTYSPKCDLVLDAAHEKSTESSSGPKREEIMESILFKCSDFVVVQFKDMDSSYAKRDAFTDSAISAKVNGEHKEKDLEPWDAGELTANEELEALENDVSNGWDPNDMFRYNEENYGVVSTYDSSLSSYTVPLERDNSEEFLKREARANQLAEEIESSAQYKARVALENDDRSEEEKYTAVQRNSSEREGHSINTRENKYIPPGQRNREVISWGSGRQNSPRMGQPGSGSMPSRSTSHTSDFNPNSGSDQRVVNGGVPWPSPCPSPSSRPPSRYQSGPNSLPPRAATPTRPPSRPPSRPSRPPSHPSAHGSPAPVSTMPKRMSSEGPPRMSPKAQRHPRNHRVSAGRGSISSGLEFVSHNPPSEAATPPVARTSPSGGTWSSVVSGVPRLSPKTHRPRSPRQNSIGNTPSGPVLASPQAGIIPTEAVAMPIPAASPTPASPASNRAVTPSSEAKDSRLQDQRQNSPAGNKENIKPNETSPSFSKAENKGISPVVSEHRKQIDDLKKFKNDFRLQPSSTSESMDQLLNKNREGEKSRDLIKDKIEPSAKDSFIENSSSNCTSGSSKPNSPSISPSILSNTEHKRGPEVTSQGVQTSSPACKQEKDDKEEKKDAAEQVRKSTLNPNAKEFNPRSFSQPKPSTTPTSPRPQAQPSPSMVGHQQPTPVYTQPVCFAPNMMYPVPVSPGVQPLYPIPMTPMPVNQAKTYRAVPNMPQQRQDQHHQSAMMHPASAAGPPIAATPPAYSTQYVAYSPQQFPNQPLVQHVPHYQSQHPHVYSPVIQGNARMMAPPTHAQPGLVSSSATQYGAHEQTHAMYACPKLPYNKETSPSFYFAISTGSLAQQYAHPNATLHPHTPHPQPSATPTGQQQSQHGGSHPAPSPVQHHQHQAAQALHLASPQQQSAIYHAGLAPTPPSMTPASNTQSPQNSFPAAQQTVFTIHPSHVQPAYTNPPHMAHVPQAHVQSGMVPSHPTAHAPMMLMTTQPPGGPQAALAQSALQPIPVSTTAHFPYMTHPSVQAHHQQQL

SEQ ID NO: 3159 - protein, 435 aa, Homo sapiens
MPPMPSAPPVHPPPDGGWGWIVVGAAFISIGFSYAFPKAVTVFFKEIQQIFHTTYSEIAWISSIMLAVMYAGGPVSSVLVNKYGSRPVVIAGGLLCCLGMVLASFSSSVVQLYLTMGFITGLGLAFNLQPALTIIGKYFYRKRPMANGLAMAGSPVFLSSLAPFNQYLFNTFGWKGSFLILGSLLLNACVAGSLMRPLGPNQTTSKSKNKTGKTEDDSSPKKIKTKKSTWEKVNKYLDFSLFKHRGFLIYLSGNVIMFLGFFAPIIFLAPYAKDQGIDEYSAAFLLSVMAFVDMFARPSVGLIANSKYIRPRIQYFFSFAIMFNGVCHLLCPLAQDYTSLVLYAVFFGLGFGSVSSVLFETLMDLVGAPRFSSAVGLVTIVECGPVLLGPPLAGKLVDLTGEYKYMYMSCGAIVVAASVWLLIGNAINYRLLAKE

SEQ ID NO: 3160 - protein, 123 aa, Homo sapiens
MTIFRCQDNCAERGYLYGGLEFGAECYCGHKIQATNVSEAECDMECKGERGSVCGGANRLSVYRLQLAQESARRYGSAVFRGCFRRPDNLSLALPVTAAMLNMSVDKCVDFCTEKEYPLAALA

SEQ ID NO: 3161 - protein, 289 aa, Homo sapiens
MEIQCSRILLSSLRFSVSRLLTLSRISAWFGPPASTPASTMSIRVTQKSYKVSTSGPRAFSSRSYTSGPGSRISSSSFSRVGSSNFRGGLGGGYGGASGMGGITAVTVNQSLLSPLVLEVDPNIQAVRTQEKEQIKTLNNKFASFIDKVRFLEQQNKMLETKWSLLQQQKTARSNMDNMFESYINNLRRQLETLGQEKLKLEAELGNMQGLVEDFKNKYEDEINKRTEMENEFVLIKKDVDEAYMNKVELESRLEGLTDEINFLRQLYEEEIRELQSQISDTSVVLSMD

SEQ ID NO: 3162 - protein, 178 aa, Homo sapiens
MSRQSSVSFRSGGSRGFGGPGFPVCPPGGIQEVTVNQSLLTPLNLQIDPSIQRVRTEEREQIKTLNNKFASFIDKVRFLEQQNKVLDTKWTLLQEQGTKTVRQNLEPLFEQYINNLRRQLDSIVGERGRLDSELRNMQDLVEDFKNKYEDEINKRTTAENEFVMLKKDVDAAYMNKVE

SEQ ID NO: 3163 - protein, 2353 aa, Homo sapiens
MNIVRKLNLMIPWSIFLLHVLLFSLQEYICASSILMGTSKNGFNENRQKRALLAAQFEATSPRYFFHDAINWGESKIKGSCPYECLNGAFCSKTGTCDCQIFQALGTRCQIIPNMGNGRDGICKTWGQYHFETFDGIYYYFPGNCSYIFAKDCGDLEPRYTVWVHNSPKCLGSVYSCYRSISLFFSNQEEIRIYGHEIKKNGISLTLPQTIGQIFIEKLADYILVKTTFGFSLAWDGISGIYLKLSEDHKGKSCGLCGNYNDIQSDDFIILQEDYTEDIAMFANSWSVQTPDDTKCVLTPSDFPNPCSSGMPAFEAIFFKCQILLQFPFLSCHEYIDPYLYIASCVNDLCKTDDDETYCRAATEYARACSHAGYPIQDWRDDFPACTDKCDDSFVHRDCISCCPPTCTFEKQCLGSNLHCLDGCYCPDGLVMDNGTCISLENCPCGFHGLAYSVGSKIEQECTECVCVGGVWNCTEQDCPVQCSVVGDSHFTTFDGRHYSFIGMCQYILVKGTGKDKFTITLQKAPCEQNLGLVCLQSITLILEDDFNKQVTLGRGGQILTSPNQGFNLNGIVEIQTLSSLFILLKTTFGLKILFAIDGERIYIQLTSAWKRRTLGLCGTFNGNIRDDFLSPSGMIEGTPQLHANAWRVSSTCFAPVHVPVVDPCNINQQNIGYAAHCDVIHQELFAPCHIYISPGLYYQLCRHDACKCGSSCLCNALAHYAYLCGQHGVPIDFRTQISFCAVVCQKGMLYHHCSSFCLHSCISLSSPEQCSDDCAEGCNCPEGKFYEDTLNFCVPIFHCRCHYRGSVYQPGELIPTPSGLCQCSNGTVKCDELATPSAVHICPEGKEYFDCRFPDPELPAGGVNCETTCANLAMNFTCTPSSPCISGCVCAPGMAEHRGKCYVPESCPCIWKDWEYLSGEVIATPCYTCVCRRGMFNCTYYPCPAVCTIYGDRHYYSFDGLEYDYISDCQVFLIKSADDSDISVIAQNKKCFDNDIVCSKSVLISVGDTEIYLNDTPYKQKQSGFFLENKSTYQLWKAGYYIVVYFPEKDITILWDRKTTIHIKVGPQWKNKLSGLCGNFDKCTSNDMTTSNNLEVRNARVFGDSWALGQCESPDETIKPCEAHQNKFPYAKKECSILYSDIFASCRNVIDVTSFAKNCHEDTCNCNLGGDCECLCTSIAAYAYKCCQEGISIHWRSSTVCSLDCEYYNEGLGEGPYMLASYGQSGLVLGANMTSRSVFCLPRSSVHTSLFFYFMITPGLFKEKVSSLALVSLESAERPNYFLYVHDNDTLSLELWEANSAFHRRATFFHHQGLWIPGYSAFELYSKKGFFIIFTDSSVKASKYDDSEEFKHSSSFSIEEIQAAVPYRKMCEWRYEPCATPCFKTCSDPEALACKFLPPVEGCLPYCPKNMILDEVTLKCVYPRDCIPVIPTEPTLMPPAKPTVPMFTVWEMITPSDITVFDMLTPTTGLECEPQKFDPVYDCSQYICLNMEWQLYNWSLNCPKDVEMPDCGFRGRPVQVNSDICCPEWECPCRCSMLSELSIITFDGNNAALYSMASYILVRIPGEIIVAHIEKCSMNQNGNSLKKLAPSGRISGLCFKKLNVTTPIHKIIVNRLARKVEVDSIVVPLPFSSQELSIEDSGSMYVITTPAGLIIKWSHLTGIIDIHFGFRFNLSSYTEGLCGICNEDPDDDLRMQNGTIITNMEDIGLFIESWEIEKSFEVTMRRPVRNCTEHDCSQCIDLLNRRIFIPCHDKVSPEDFCEKMWINYTYFWNYECDALSAYVALCNKFDICIQWRTPDYCSLSCPEGKEYQPCVRPCEARTCLNQWFYGHTSCLNLREDCVCKVGTILHRPHSAQCIPEKECACTDSEDQPRTAGEIWNGGIDECTLYKCLENGSIIPIEPDCDEEPTPVCEREAEVVMGIIDKWTCCSKEVCGCDTTLCETSIPTCTNSQKLIVGHSPLSCCPQYKCECDPLKCPSISTPECREDQFMIQVRQEEPCCFSPFCVCESCTKPVPLCHDGEFLTVDLNSTHFCCPQYYCVCEPNLCPMPLLNCAEDMNLVKENVSGQCCPTWHCECNCENLIMPTCEVGEFTAIDHNFQSDCGCIQYLCEKDDVCVFQEVSVLNPGQSMIKYLEEDFCYAIECLEEKDNHTGFHTLNFTLVNCSKKCDVHQVYTPSPSDYGCCGTCKNVSCKFHMENGTSVVYAVGSTWHYNCTTYECVKTDEGAIILNYTMVCPPFNETECKMNEGIVKLYNEGCCKICKREERICQKVIIKSVIRKQDCMSQSPINVASCDGKCPSATIYNINIESHLRFCKCCRENGVRNLSVPLYCSGNGTEIMYTLQEPIDCTCQWN

SEQ ID NO: 3164 - protein, 585 aa, Homo sapiens
MAKLWFKFQRYFRRKPVRFFTFLALYLTAGSLVFLHSGFVGQPAVSGNQANPAAAGGPAEGAELSFLGDMHLGRGFRDTGEASSIARRYGPWFKGKDGNERAKLGDYGGAWSRALKGRVVREKEEERAKYIGCYLDDTQSRALRGVSFFDYKKMTIFRCQDNCAERGYLYGGLEFGAECYCGHKIQATNVSEAECDMECKGERGSVCGGANRLSVYRLQLAQESARRYGSAVFRGCFRRPDNLSLALPVTAAMLNMSVDKCVDFCTEKEYPLAALAGTACHCGFPTTRFPLHDREDEQLCAQKCSAEEFESCGTPSYFIVYQTQVQDNRCMDRRFLPGKSKQLIALASFPGAGNTWARHLIELATGFYTGSYYFDGSLYNKGFKGERDHWRSGRTICIKTHESGQKEIEAFDAAILLIRNPYKALMAEFNRKYGGHIGFAAHAHWKGKGAVPGSLQILFRSICTASVGEWPEFVRNYAPWWATHTLDWLKFGKKVLVVHFEDLKQDLFVQLGRMVSLLGVAVREDRLLCVESQKDGNFKRSGLRKLEYDPYTADMQKTISAYIKMVDAALKGRNLTGVPDDYYPR

SEQ ID NO: 3165 - protein, 1007 aa, Homo sapiens
MARRGKKPVVRTLEDLTLDSGYGGAADSVRSSNLSLCCSDSHPASPYGGSCWPPLADSMHSRHNSFDTVNTALVEDSEGLDCAGQHCSRLLPDLDEVPWTLQELEALLLRSRDPRAGPAVPGGLPKDALAKLSTLVSRALVRIAKEAQRLSLRFAKCTKYEIQSAMEIVLSWGLAAHCTAAALAALSLYNMSSAGGDRLGRGKSARCGLTFSVGRVYRWMVDSRVALRIHEHAAIYLTACMESLFRDIYSRVVASGVPRSCSGPGSGSGSGPGPSSGPGAAPAADKEREAPGGGAASGGACSAASSASGGSSCCAPPAAAAAAVPPAAAANHHHHHHHALHEAPKFTVETLEHTVNNDSEIWGLLQPYQHLICGKNASGVLCLPDSLNLHRDPQRSNKPGELPMFSQSELRTIEQSLLATRVGSIAELSDLVSRAMHHLQPLNAKHHGNGTPLHHKQGALYWEPEALYTLCYFMHCPQMEWENPNVEPSKVNLQVERPFLVLPPLMEWIRVAVAHAGHRRSFSMDSDDVRQAARLLLPGVDCEPRQLRADDCFCASRKLDAVAIEAKFKQDLGFRMLNCGRTDLVKQAVSLLGPDGINTMSEQGMTPLMYACVRGDEAMVQMLLDAGADLNVEVVSTPHKYPSVHPETRHWTALTFAVLHGHIPVVQLLLDAGAKVEGSVEHGEENYSETPLQLAAAVGNFELVSLLLERGADPLIGTMYRNGISTTPQGDMNSFSQAAAHGHRNVFRKLLAQPEKEKSDILSLEEILAEGTDLAETAPPPLCASRNSKAKLRALREAMYHSAEHGYVDVTIDIRSIGVPWTLHTWLESLRIAFQQHRRPLIQCLLKEFKTIQEEEYTEELVTQGLPLMFEILKASKNEVISQQLCVIFTHCYGPYPIPKLTEIKRKQTSRLDPHFLNNKEMSDVTFLVEGRPFYAHKVLLFTASPRFKALLSSKPTNDGTCIEIGYVKYSIFQLVMQYLYYGGPESLLIKNNEIMEVRDPLWCWLS

SEQ ID NO: 3166 - protein, 331 aa, Homo sapiens
METVISSDSSPAVENEHPQETPESNNSVYTSFMKSHRCYDLIPTSSKLVVFDTSLQVKKAFFALVTNGVRAAPLWDSKKQSFVGMLTITDFINILHRYYKSALVQIYELEEHKIETWREVYLQDSFKPLVCISPNASLFDAVSSLIRNKIHRLPVIDPESGNTLYILTHKRILKFLKLFITEFPKPEFMSKSLEELQIGTYANIAMVRTTTPVYVALGIFVQHRVSALPVVDEKGRVVDIYSKFDVINLAAEKTYNNLDVSVTKALQHRSHYFEGVLKCYLHETLETIINRLVEAEVHRLVVVDENDVVKGIVSLSDILQALVLTGGEKKP

SEQ ID NO: 3167 - protein, 543 aa, Homo sapiens
MSRQLNIKSSGDKGNFSVHSAVVPRKAVGSLASYCAAGRGAGAGFGSRSLYSLGGNRRISFNVAGGGVRAGGYGFRPGSGYGGGRASGFAGSMFGSVALGPACLSVCPPGGIHQVTVNKSLLAPLNVELDPEIQKVRAQEREQIKVLNDKFASFIDKVRFLEQQNQVLETKWELLQQLDLNNCKKNLEPILEGYISNLRKQLETLSGDRVRLDSELRSMRDLVEDYKKRYEVEINRRTTAENEFVVLKKDADAAYAVKVELQAKVDSLDKEIKFLKCLYDAEIAQIQTHASETSVILSMDNNRDLDLDSIIAEVRMHYEEIALKSKAEAEALYQTKIQELQLAASRHGDDLKHTRSEMVELNRLIQRIRCEIGNVKKQIFSVSNEPAPCPLWRASLETAIADAEQRGDNALKDAQAKLDELEGALHQAKEELARMLREYQELMSLKLALDMEIATYRKLLEGEECRMSGENPSSVSISVISSSSYSYHHPSSAGVDLGASAVAGSSGSTQSGQTKTTEARGGDLKDTQGKSTPASIPARKATR

SEQ ID NO: 3168 - protein, 222 aa, Homo sapiens
AAAAVPPAAAANHHHHHHHALHEAPKFTVETLEHTVNNDSEIWGLLQPYQHLICGKNASGDLVSRAMHHLQPLNAKHHGNGTPLHHKQGALYWEPEALYTLCYFMHCPQMEWENPNVEPSKVNLQVERPFLVLPPLMEWIRVAVAHAGHRRSFSMDSDDVRQAARLLLPGVDCEPRQLRADDCFCASRKLDAVAIEAKFKQDLGFRMLNCGRTDLVKQAVSL

SEQ ID NO: 3169 - protein, 202 aa, Homo sapiens
MSILKVKKAFFALVTNGVRAAPLWDSKKQSFVGMLTITDFINILHRYYKSALVQIYELEEHKIETWREVYLQDSFKPLVCISPNARSLSSPSQSSCPSLWKSYRLAPMPILLWFALPPPSMWLWGFLYSIESQPCQWWMRRNLAAEKTYNNLDVSVTKALQHRSHYFEGVLKCYLHETLETIINRLVEAEVHRLVVVDENDV

SEQ ID NO: 3170 - protein, 273 aa, Homo sapiens
MSIRVTQKSYKVSTSGPRAFSSRSYTSGPGSRISSSSFSRVGSSNFRGGLGGGYGGASGMGGITAVTVNQSLLSPLVLEVDPNIQAVRTQEKEQIKTLNNKFASFIDKVRFLEQQNKMLETKWSLLQQQKTARSNMDNMFESYINNLRRQLETLGQEKLKLEAELGNMQGLVEDFKNKYEDEINKRTEMENEFVLIKKDVDEAYMNKVELESRLEGLTDEINFLRQLYEEEIRELQSQISDTSVVLSMDNSRSLDMDSIIAEVKAQYEDIANR

SEQ ID NO: 3171 - protein, 1440 aa, Homo sapiens
MYPNWGRYGGSSHYPPPPVPPPPPVALPEASPGPGYSSSTTPAAPSSSGFMSFREQHLAQLQQLQQMHQKQMQCVLQPHHLPPPPLPPPPVMPGGGYGDWQPPPPPMPPPPGPALSYQKQQQYKHQMLHHQRDGPPGLVPMELESPPESPPVPPGSYMPPSQSYMPPPQPPPSYYPPTSSQPYLPPAQPSPSQSPPSQSYLAPTPSYSSSSSSSQSYLSHSQSYLPSSQASPSRPSQGHSKSQLLAPPPPSAPPGNKTTVQQEPLESGAKNKSTEQQQAAPEPDPSTMTPQEQQQYWYRQHLLSLQQRTKVHLPGHKKGPVVAKDTPEPVKEEVTVPATSQVPESPSSEEPPLPPPNEEVPPPLPPEEPQSEDPEEDARLKQLQAAAAHWQQHQQHRVGFQYQGIMQKHTQLQQILQQYQQIIQPPPHIQTMSVDMQLRHYEMQQQQFQHLYQEWEREFQLWEEQLHSYPHKDQLQEYEKQWKTWQGHMKATQSYLQEKVNSFQNMKNQYMGNMSMPPPFVPYSQMPPPLPTMPPPVLPPSLPPPVMPPALPATVPPPGMPPPVMPPSLPTSVPPPGMPPSLSSAGPPPVLPPPSLSSAGPPPVLPPPSLSSTAPPPVMPLPPLSSATPPPGIPPPGVPQGIPPQLTAAPVPPASSSQSSQVPEKPRPALLPTPVSFGSAPPTTYHPPLQSAGPSEQVNSKAPLSKSALPYSSFSSDQGLGESSAAPSQPITAVKDMPVRSGGLLPDPPRSSYLESPRGPREQKEQLQKMKDFGSEPQMADHLPPQESRLQNTSSRPGMYPPPGSYRPPPPMGKPPGSIVRPSAPPARSSVPVTRPPVPIPPPPPPPPLPPPPPVIKPQTSAVEQERWDEDSFYGLWDTNDEQGLNSEFKSETAAIPSAPVLPPPPVHSSIPPPGPVPMGMPPMSKPPPVQQTVDYGHGRDISTNKVEQIPYGERITLRPDPLPERSTFETEHAGQRDRYDRERDREPYFDRQSNVIADHRDFKRDRETHRDRDRDRGVIDYDRDRFDRERRPRDDRAQSYRDKKDHSSSRRGGFDRPSYDRKSDRPVYEGPSMFGGERRTYPEERMPLPAPSLSHQPPPAPRVEKKPESKNVDDILKPPGRESRPERIVVIMRGLPGSGKTHVAKLIRDKEVEFGGPAPRVLSLDDYFITEVEKEEKDPDSGKKVKKKVMEYEYEAEMEETYRTSMFKTFKKTLDDGFFPFIILDAINDRVRHFDQFWSAAKTKGFEVYLAEMSADNQTCGKRNIHGRKLKEINKMADHWETAPRHMMRLDIRSLLQDAAIEEVEMEDFDANIEEQKEEKKDAEEEESELGYIPKSKWEMDTSEAKLDKLDGLRTGTKRKRDWEAIASRMEDYLQLPDDYDTRASEPGKKRVRWADLEEKKDADRKRAIGFVVGQTDWEKITDESGHLAEKALNRTKYI

SEQ ID NO: 3172 - protein, 925 aa, Homo sapiens
MPGEATETVPATEQELPQPQAETAVLPMSSALSVTAALGQPGPTLPPPCSPAPQQCPLSAANQASPFPSPSTIASTPLEVPFPQSSSGTALPLGTAPEAPTFLPNLIGPPISPAALALASPMIAPTLKGTPSSSAPLALVALAPHSVQKSSAFPPNLLTSPPSVAVAESGSVITLSAPIAPSEPKTNLNKVPSEVVPNPKGTPSPPCIVSTVPYHCVTPMASIQSGVASLPQTTPTTTLAIASPQVKDTTISSVLISPQNPGSLSLKGPVSPPAALSLSTQSLPVVTSSQKTAGPNTPPDFPISLGSHLAPLHQSSFGSVQLLGQTGPSALSDPTVKTISVDHSSTGASYPSQRSVIPPLPSRNEVVPATVAAFPVVAPSVDKGPSTISSITCSPSGSLNVATSFSLSPTTSLILKSSPNATYHYPLVAQMPVSSVGTTPLVVTNPCTIAAAPTTTFEVATCVSPPMSSGPISNIEPTSPAALVMAPVAPKEPSTQVATTLRIPVSPPLPDPEDLKNLPSSVLVKFPTQKDLQTVPASLEGAPFSPAQAGLTTKKDPTVLPLVQAAPKNSPSFQSTSSSPEIPLSPEATLAKKSLGEPLPIVAAFPLESADPAGVAPTTAKAAAFEKVLPKPESASVSAAPSPPVSLPLAPSPVPTLPPKQQFLPSSPGLVLESPSKPLAPADEDELLPLIPPEPISGGVPFQSVLVNMPTPKSAGIPVPTPSAKQPVTKNNKGSGTESDSDESVPELEEQDSTQATTQQAQLAAAAEIDEEPVSKAKQSRSEKKARKAMSKLGLRQVTGVTRVTIRKSKNILFVITKPDVYKSPASDTYIVFGEAKIEDLSQQAQLAAAEKFKVQGEAVSNIQENTQTPTVQEESEEEEVDETGVEVKDIELVMSQANVSRAKAVRALKNNSNDIVNAIMELTM

SEQ ID NO: 3173 - protein, 147 aa, Homo sapiens
MSRQSSVSFRSGGSRSFSTASAITPSVSRTSFTSVSRSGGGGGGGFGRVSLAGACGVGGYGFGGGAGSGFGFGGGAGGGFGLGGGAGFGGGFGGPGFPVCPPGGIQEVTVNQSLLTPLNLQIDPSIQRVRTEEREQIKTLNNKFASF

SEQ ID NO: 3174 - protein, 185 aa, Homo sapiens
METFDPTELPELLKLYYRRLFPYSQYYRWLNYGGVIKNYFQHREFSFTLKDDIYIRYQSFNNQSDLEKEMQKMNPYKIDIGAVYSHRPNQHNTVKLGAFQAQEKELVFDIDMTDYDDVRRCCSSADICPKCWTLMTMAIRIIDRALKGKTLDLSIVSGYILEGEVFIVGSVMNQLENCLLQYVLG

SEQ ID NO: 3175 - protein, 125 aa, Homo sapiens
MKSHRCYDLIPTSSKLVVFDTSLQVKKAFFALVTNGVRAAPLWDSKKQSFVGMLTITDFINILHRYYKSALVQIYELEEHKIETWREVYLQDSFKPLVCISPNASLFDAVSSLIRNKIHRLPVID

SEQ ID NO: 3176 - protein, 69 aa, Homo sapiens
MKSHRCYDLIPTSSKLVVFDTSLQVKKAFFALVTNGVRAAPLWDSKKQSFVGMLTITDFINILHRYYKS

SEQ ID NO: 3177 - protein, 259 aa, Homo sapiens
MATAAQGPLSLLWGWLWSERFWLPENVSWADLEGPADGYGYPRGRHILSVFPLAAGIFFVRLLFERFIAKPCALCIGIEDSGPYQAQPNAILEKVFISITKYPDKKRLEGLSKQLDWNVRKIQCWFRHRRNQDKPPTLTKFCESMWRFTFYLCIFCYGIRFLWSSPWFWDIRQCWHNYPFQDFLIMFVHHLVTIGLISFSYINNMVRVGTLIMCLHDVSDFLLEAAKLANYAKYQRLCDTLFVIFSAVFMVTRLGIYPF

SEQ ID NO: 3178 - protein, 577 aa, Homo sapiens
MDPGAGSETSLTVNEQVIVMSGHETIRVLEVGVDAQLPAEEESKGLEGVAAEGSQSGDPAEASQAAGEAGPDNLGSSAEATVTPGDPSEPCHCHCHLQPSPKPASGIADPDATGCTSCPPGQVAGQQGLAVWTIPTATVAALPGLTAASPTGGVFKPPLAGLQAAAVLNTALPAPVQAAAPVQASSTAQPRPPAQPQTLFQTQPLLQTTPAILPQPTAATAAAPTPKPVDTPPQITVQPAGFAFSPGIISAASLGGQTQILGSLTTAPVITSAIPSMPGISSQILTNAQGQVIGTLPWVVNSASVAAPAPAQSLQVQAVTPQLLLNAQGQVIATLASSPLPPPVAVRKPSTPESPAKSEVQPIQPTPTVPQPAVVIASPAPAAKPSASAPIPITCSETPTVSQLVSKPHTPSLDEDGINLEEIREFAKNFKIRRLSLGLTQTQVGQALTATEGPAYSQSAICRFEKLDITPKSAQKLKPVLEKWLNEAELRNQEGQQNLMEFVGGEPSKKRKRRTSFTPQAIEALNAYFEKNPLPTGQEITEIAKELNYDREVVRVWFCNRRQTLKNTSKLNVFQIP

SEQ ID NO: 3179 - protein, 814 aa, Homo sapiens
MVLRRMHRPRSCSYQLLLEHQRPSCIQGLRWTPLTNSEESLDFSESLEQASTERVLRAGRQLHRHLLATCPNLIRDRKYHLRLYRQCCSGRELVDGILALGLGVHSRSQVVGICQVLLDEGALCHVKHDWAFQDRDAQFYRFPGPEPEPVRTHEMEEELAEAVALLSQRGPDALLTVALRKPPGQRTDEELDLIFEELLHIKAVAHLSNSVKRELAAVLLFEPHSKAGTVLFSQGDKGTSWYIIWKGSVNVVTHGKGLVTTLHEGDDFGQLALVNDAPRAATIILREDNCHFLRVDKQDFNRIIKDVEAKTMRLEEHGKVVLVLERASQGAGPSRPPTPGRNRYTVMSGTPEKILELLLEAMGPDSSAHDPTETFLSDFLLTHRVFMPSAQLCAALLHHFHVEPAGGSEQERSTYVCNKRQQILRLVSQWVALYGSMLHTDPVATSFLQKLSDLVGRDTRLSNLLREQWPERRRCHRLENGCGNASPQMKARNLPVWLPNQDEPLPGSSCAIQVGDKDAIGLQPDARGVATSLGLNERLFVVNPQEVHELIPHPDQLGPTVGSAEGLDLVSAKDLAGQLTDHDWSLFNSIHQVELIHYVLGPQHLRDVTTANLERFMRRFNELQYWVATELCLCPVPGPRAQLLRKFIKLAAHNSAISRLAHTWERLPHKVRKLYSALERLLDPSWNHRVYRLALAKLSPPVIPFMPLLLKDMTFIHEGNHTLVENLINFEKMRMMARAARMLHHCRSHNPVPLSPLRSRVSHLHEDSQVARISTCSEQSLSTRSPASTWAYVQQLKVIDNQRELSRLSRELEP

SEQ ID NO: 3180 - protein, 805 aa, Homo sapiens
MAKSSSLNVRVVEGRALPAKDVSGSSDPYCLVKVDDEVVARTATVWRSLGPFWGEEYTVHLPLDFHQLAFYVLDEDTVGHDDIIGKISLSREAITADPRGIDSWINLSRVDPDAEVQGEICLSVQMLEDGQGRCLRCHVLQARDLAPRDISGTSDPFARVFWGSQSLETSTIKKTRFPHWDEVLELREMPGAPSPLRVELWDWDMVGKNDFLGMVEFSPKTLQQKPPKGWFRLLPFPRAEEDSGGNLGALRVKVRLIEDRVLPSQCYQPLMELLMESVQGPAEEDTASPLALLEELTLGDCRQDLATKLVKLFLGRGLAGRFLDYLTRREVARTMDPNTLFRSNSLASKSMEQFMKLVGMPYLHEVLKPVISRVFEEKKYMELDPCKMDLGRTRRISFKGALSEEQMRETSLGLLTGYLGPIVDAIVGSVGRCPPAMRLAFKQLHRRVEERFPQAEHQDVKYLAISGFLFLRFFAPAILTPKLFDLRDQHADPQTSRSLLLLAKAVQSIGNLGQQLGQGKELWMAPLHPFLLQCVSRVRDFLDRLVDVDGDEEAGVPARALFPPSAIVREGYLLKRKEEPAGLATRFAFKKRYVWLSGETLSFSKSPEWQMCHSIPVSHIRAVERVDEGAFQLPHVMQVVTQDGTGALHTTYLQCKNVNELNQWLSALRKASAPNPNKLAACHPGAFRSARWTCCLQAERSAAGCSRTHSAVTLGDWSDPLDPDAEAQTVYRQLLLGRDQLRLKLLEDSNMDTTLEADTGACPEVLARQRAATARLLEVLADLDRAHEEFQQQERGKAALGPLGP

SEQ ID NO: 3181 - protein, 764 aa, Homo sapiens
MLAQESYPKKRNYTMEIVPSASLDTFPSENENFLCDLMDTAVTKKPCSLEIARAPSPRTDNASEVAVTTPGTSNHRNSSTGPTPDCSPPSPDTALKNIVKVIRPQPKQRTSIVSSLDFHRMNHNQEYFEINTSTGCTSFTASPPASPPTSSVGTTEVKNEGTNHTDDLSRQDDNDPPKEYDPGQFAGLLHGSSPACESPENPFHLYGKREQCEKGQDEVSLANSPLPFKQSPIENNSEPLVKKIKPKVVSRTIFHKKSNQLENHTIVGTRSTRSGSRNGDQWVMNAGGFVERACTLGRIRSLPKALIDMHLSKSVSKSDSDLIAYPSNEKTSRVNWSESSTAEHSSKGNSERTPSFTSEWEEIDKIMSSIDVGINNELKEMNGPRCPVQTVGQWLESIGLPQYENHLMANGFDNVQFMGSNVMEDQDLLEIGILNSGHRQRILQAIQLLPKMRPIGHDGYHPTSVAEWLDSIELGDYTKAFLINGYTSMDLLKKIWEVELINVLKINLIGHRKRILASLGDRLHDDPPQKPPRSITLRTGDWGEPSITLRPPNEATASTPVQYWQHHPEKLIFQSCDYKAFYLGSMLIKELRGTESTQDACAKMRANCQKSTEQMKKVPTIILSVSYKGVKFIDATNKNIIAEHEIRNISCAAQDPEDLSTFAYITKDLKSNHHYCHVFTAFDVNLAYEIILTLGQAFEVAYQLALQARKGGHSSTLPESFENKPSKPIPKPRVSIRKSVDLLHASHTGQEPSERHTEEALRKF

SEQ ID NO: 3182 - protein, 40 aa, Homo sapiens
DVEIATYRRLLEGEECSLGGRQRCHVWRSWWRLGEHLWTR

SEQ ID NO: 3183 - protein, 164 aa, Homo sapiens
MLAMDTCKHVGQLQLAQDHSSLNPQKWHCVDCNTTESIWACLSCSHVACGRYIEEHALKHFQESSHPVALEVNEMYVFCYLCDDYVLNDNTTGDLKLLRRTLSAIKSQNYHCTTRSGRFLRSMGTGDDSYFLHDGAQSLLQSEDQLYTALWHRRRILMGKIFRT

SEQ ID NO: 3184 - protein, 496 aa, Homo sapiens
MLAMDTCKHVGQLQLAQDHSSLNPQKWHCVDCNTTESIWACLSCSHVACGRYIEEHALKHFQESSHPVALEVNEMYVFCYLCDDYVLNDNTTGDLKLLRRTLSAIKSQNYHCTTRSGRFLRSMGTGDDSYFLHDGAQSLLQSEDQLYTALWHRRRILMGKIFRTWFEQSPIGRKKQEEPFQEKIVVKREVKKRRQELEYQVKAELESMPPRKSLRLQGLAQSTIIEIVSVQVPAQTPASPAKDKVLSTSENEISQKVSDSSVKRRPIVTPGVTGLRNLGNTCYMNSVLQVLSHLLIFRQCFLKLDLNQWLAMTASEKTRSCKHPPVTDTVVYQMNECQEKDTGFVCSRQSSLSSGLSGGASKGRKMELIQPKEPTSQYISLCHELHTLFQVMWSGKWALVSPFAMLHSVWRLIPAFRGYAQQDAQEFLCELLDKIQRELETTGTSLPALIPTSQRKLIKQVLNVVNNIFHGQLLSQQSVEGFPPNQLYSQKPRNNL

SEQ ID NO: 3185 - protein, 82 aa, Homo sapiens
MKSHRCYDLIPTSSKLVVFDTSLQVKKAFFALVTNGVRAAPLWDSKKQSFVGMLTITDFINILHRYYKSALVQIYELEEHKI

SEQ ID NO: 3186 - protein, 531 aa, Homo sapiens
HLSKSVSKSDSDLIAYPSNEKTSRVNWSESSTAEHSSKGNSERTPSFTSEWEEIDKIMSSIDVGINNELKEMNGETTRPRCPVQTVGQWLESIGLPQYENHLMANGFDNVQFMGSNVMEDQDLLEIGILNSGHRQRILQAIQLLPKMRPIGHDGYHPTSVAEWLDSIELGDYTKAFLINGYTSMDLLKKIWEVELINVLKINLIGHRKRILASLGDRLHDDPPQKPPRSITLREPSGNHTPPQLSPSLSQSTYTTGGSLDVPHIIMQGDARRRRNENYFDDIPRSKLERQMAQTGDWGEPSITLRPPNEATASTPVQYWQHHPEKLIFQSCDYKAFYLGSMLIKELRGTESTQDACAKMRANCQKSTEQMKKVPTIILSVSYKGVKFIDATNKNIIAEHEIRNISCAAQDPEDLSTFAYITKDLKSNHHYCHVFTAFDVNLAYEIILTLGQAFEVAYQLALQARKGGHSSTLPESFENKPSKPIPKPRVSIRKSVQIDPSEQKTLANLPWIVEPGQEAKRGINTKYETTIF

SEQ ID NO: 3187 - protein, 351 aa, Homo sapiens
MATAAQGPLSLLWGWLWSERFWLPENVSWADLEGPADGYGYPRGRHILSVFPLAAGIFFVRLLFERFIAKPCALCIGIEDSGPYQAQPNAILEKVFISITKYPDKKRLEGLSKQLDWNVRKIQCWFRHRRNQDKPPTLTKFCESMWRFTFYLCIFCYGIRFLWSSPWFWDIRQCWHNYPFQPLSSGLYHYYIMELAFYWSLMFSQFTDIKRKDFLIMFVHHLVTIGLISFSYINNMVRVGTLIMCLHDVSDFLLEAAKLANYAKYQRLCDTLFVIFSAVFMVTRLGIYPFCFSVLFYSTFANRTQEPYCPAFTLACADLLWTLIGPLLPQTVFLARSDPDSEYPAWLASQD

SEQ ID NO: 3188 - protein, 280 aa, Homo sapiens
MSILKVKKAFFALVTNGVRAAPLWDSKKQSFVGMLTITDFINILHRYYKSALVQIYELEEHKIETWREVYLQDSFKPLVCISPNASLFDAVSSLIRNKIHRLPVIDPESGNTLYILTHKRILKFLKLFITEFPKPEFMSKSLEELQIGTYANIAMVRTTTPVYVALGIFVQHRVSALPVVDEKGRVVDIYSKFDVINLAAEKTYNNLDVSVTKALQHRSHYFEGVLKCYLHETLETIINRLVEAEVHRLVVVDENDVVKGIVSLSDILQALVLTGGEKKP

SEQ ID NO: 3189 - protein, 299 aa, Homo sapiens
MKSHRCYDLIPTSSKLVVFDTSLQVKKAFFALVTNGVRAAPLWDSKKQSFVGMLTITDFINILHRYYKSALVQIYELEEHKIETWREVYLQDSFKPLVCISPNASLFDAVSSLIRNKIHRLPVIDPESGNTLYILTHKRILKFLKLFITEFPKPEFMSKSLEELQIGTYANIAMVRTTTPVYVALGIFVQHRVSALPVVDEKGRVVDIYSKFDVINLAAEKTYNNLDVSVTKALQHRSHYFEGVLKCYLHETLETIINRLVEAEVHRLVVVDENDVVKGIVSLSDILQALVLTGGEKKP

SEQ ID NO: 3190 - protein, 1206 aa, Homo sapiens
MTSAAEIKKPPVAPKPKFVVANNKPAPPPIAPKPDIVISSVPQSTKKMKPAIAPKPKVLKTSPVREIGQSPSRKIMLNLEGHKQELAESTDNFNCKYEGNQSNDYISPMCSCSSECIHKLGHRENLCVKQLVLEPLEMNENLENSKIDETLTIKTRSKCDLYGEKAKNQGGVVLKASVLEEELKDALIHQMPPFISAQKHRPTDSPEMNGGCNSNGQFRIEFADLSPSPSSFEKVPDHHSCHLQLPSDECEHFETCQDDSEKSNNCFQSSELEALENGKRSTLISSDGVSKKSEVKDLGPLEIHLVPYTPKFPTPKPRKTRTARLLRQKCVDTPSESTEEPGNSDSSSSCLTENSLKINKISVLHQNVLCKQEQVDKMKLGNKSELNMESNSDAQDLVNSQKAMCNETTSFEKMAPSFDKDSNLSSDSTTVDGSSMSLAVDEGTGFIRCTVSMSLPKQLKLTCNEHLQSGRNLGVSAPQMQKESVIKEENSLRIVPKKPQRHSLPATGVLKKAASEELLEKSSYPSSEEKSSEKSLERNHLQHLCAQNRGVSSSFDMPKRASEKPVWKLPHPILPFSGNPEFLKSVTVSSNSEPSTALTKPRAKSLSAMDVEKCTKPCKDSTKKNSFKKLLSMKLSICFMKSDFQKFWSKSSQLGDTTTGHLSSGEQKGIESDWQGLLVGEEKRSKPIKAYSTENYSLESQKKRKKSRGQTSAANGLRAESLDDQMLSRESSSQAPYKSVTSLCAPEYENIRHYEEIPEYENLPFIMAIRKTQELEWQNSSSMEDADANVYEVEEPYEAPDGQLQLGPRHQHSSSGASQEEQNDLGLGDLPSDEEEIINSSDEDDVSSESSKGEPDPLEDKQDEDNGMKSKVHHIAKEIMSSEKVFVDVLKLLHIDFRDAVAHASRQLGKPVIEDRILNQILYYLPQLYELNRDLLKELEERMLHWTEQQRIADIFVKKGPYLKMYSTYIKEFDKNIALLDEQCKKNPGFAAVVREFEMSPRCANLALKHYLLKPVQRIPQYRLLLTDYLKNLIEDAGDYRDTQDALAVVIEVANHANDTMKQGDNFQKLMQIQYSLNGHHEIVQPGRVFLKEGILMKLSRKVMQPRMFFLFNDALLYTTPVQSGMYKLNNMLSLAGMKVRKPTQEAYQNELKIESVERSFILSASSATERDEWLEAISRAIEEYAKKRITFCPSRSLDEADSENK

SEQ ID NO: 3191 - protein, 28 aa, Homo sapiens
MLTITDFINILHRYYKSALVQIYELEEH

SEQ ID NO: 3192 - protein, 251 aa, Homo sapiens
NSVYTSFMKSHRCYDLIPTSSKLVVFDTSLQVKKAFFALVTNGVRAAPLWDSKKQSFVGMLTITDFINILHRYYKSALVQIYELEEHKIETWREVYLQDSFKPLVCISPNARSLSSPSQSSCPSLWKSYRLAPMPILLWFALPPPSMWLWGFLYSIESQPCQWWMRRNLAAEKTYNNLDVSVTKALQHRSHYFEGVLKCYLHETLETIINRLVEAEVHRLVVVDENDVVKGIVSLSDILQALVLTGGEKKP

SEQ ID NO: 3193 - protein, 511 aa, Homo sapiens
MNGVSWSQDLQEGISAWFGPPASTPASTMSIRVTQKSYKVSTSGPRAFSSRSYTSGPGSRISSSSFSRVGSSNFRGGLGGGYGGASGMGGITAVTVNQSLLSPLVLEVDPNIQAVRTQEKEQIKTLNNKFASFIDKVRFLEQQNKMLETKWSLLQQQKTARSNMDNMFESYINNLRRQLETLGQEKLKLEAELGNMQGLVEDFKNKYEDEINKRTEMENEFVLIKKDVDEAYMNKVELESRLEGLTDEINFLRQLYEEEIRELQSQISDTSVVLSMDNSRSLDMDSIIAEVKAQYEDIANRSRAEAESMYQIKYEELQSLAGKHGDDLRRTKTEISEMNRNISRLQAEIEGLKGQRASLEAAIADAEQRGELAIKDANAKLSELEAALQRAKQDMARQLREYQELMNVKLALDIEIATYRKLLEGEESRLESGMQNMSIHTKTTSGYAGGLSSAYGGLTSPGLSYSLGSSFGSGAGSSSFSRTSSSRAVVVKKIETRDGKLVSESSDVLPK

SEQ ID NO: 3194 - protein, 407 aa, Homo sapiens
MRLLAWLIFLANWGGARAEPGKFWHIADLHLDPDYKVSKDPFQVCPSAGSQPVPDAGPWGDYLCDSPWALINSSIYAMKEIEPEPDFILWTGDDTPHVPDEKLGEAAVLEIVERLTKLIREVFPGAFYCEKLPGPSGAGRIVVLNTNLYYTSNALTADMADPGQQFQWLEDVLTDASKAGDMVYIVGHVPPGFFEKTQNKAWFREGFNEKYLKVVRKHHRVIAGQFFGHHHTDSFRMLYDDAGVPISAMFITPGVTPWKTTLPGVVNGANNPAIRVFEYDRATLSLKDMVTYFMNLSQANAQGTPRWELEYQLTEAYGVPDASAHSMHTVLDRIAGDQSTLQRYYVYNSVSYSAGVCDEACSMQHVCAMRQVDIDAYTTCLYASGTTPVPQLPLLLMALLGLCTLVL

SEQ ID NO: 3195 - protein, 1248 aa, Homo sapiens
MGKDQELLEAARTGNVALVEKLLSGRKGGILGGGSGPLPLSNLLSIWRGPNVNCTDSSGYTALHHAALNGHKDIVLKLLQYEASTNVADNKGYFPIHLAAWKGDVEIVKILIHHGPSHSRVNEQNNENETALHCAAQYGHSEVVAVLLEELTDPTIRNSKLETPLDLAALYGRLRVVKMIISAHPNLMSCNTRKHTPLHLAARNGHKAVVQVLLEAGMDVSCQTEKGSALHEAALFGKVDVVRVLLETGIDANIKDSLGRTVLDILKEHPSQKSLQIATLLQEYLEGVGRSTVLEEPVQEDATQETHISSPVESPSQKTKSETVTGELSKLLDEIKLCQEKDYSFEDLCHTISDHYLDNLSKISEEELGKNGSQSVRTSSTINLSPGEVEEEDDDENTCGPSGLWEALTPCNGCRNLGFPMLAQESYPKKRNYTMEIVPSASLDTFPSENENFLCDLMDTAVTKKPCSLEIARAPSPRTDNASEVAVTTPGTSNHRNSSTGPTPDCSPPSPDTALKNIVKVIRPQPKQRTSIVSSLDFHRMNHNQEYFEINTSTGCTSFTASPPASPPTSSVGTTEVKNEGTNHTDDLSRQDDNDPPKEYDPGQFAGLLHGSSPACESPENPFHLYGKREQCEKGQDEVSLANSPLPFKQSPIENNSEPLVKKIKPKVVSRTIFHKKSNQLENHTIVGTRSTRSGSRNGDQWVMNAGGFVERACTLGRIRSLPKALIDMHLSKSVSKSDSDLIAYPSNEKTSRVNWSESSTAEHSSKGNSERTPSFTSEWEEIDKIMSSIDVGINNELKEMNGETTRPRCPVQTVGQWLESIGLPQYENHLMANGFDNVQFMGSNVMEDQDLLEIGILNSGHRQRILQAIQLLPKMRPIGHDGYHPTSVAEWLDSIELGDYTKAFLINGYTSMDLLKKIWEVELINVLKINLIGHRKRILASLGDRLHDDPPQKPPRSITLREPSGNHTPPQLSPSLSQSTYTTGGSLDVPHIIMQGDARRRRNENYFDDIPRSKLERQMAQTGDWGEPSITLRPPNEATASTPVQYWQHHPEKLIFQSCDYKAFYLGSMLIKELRGTESTQDACAKMRANCQKSTEQMKKVPTIILSVSYKGVKFIDATNKNIIAEHEIRNISCAAQDPEDLSTFAYITKDLKSNHHYCHVFTAFDVNLAYEIILTLGQAFEVAYQLALQARKGGHSSTLPESFENKPSKPIPKPRVSIRKSVDLLHASHTGQEPSERHTEEALRKF

SEQ ID NO: 3196 - protein, 111 aa, Homo sapiens
MLAMDTCKHVGQLQLAQDHSSLNPQKWHCVDCNTTESIWACLSCSHVACGRYIEEHALKHFQESSHPVALEVNEMYVFCYLCDDYVLNDNTTGDLKLLRRTLSAIKSQNYH

SEQ ID NO: 3197 - protein, 161 aa, Homo sapiens
MKSHRCYDLIPTSSKLVVFDTSLQVKKAFFALVTNGVRAAPLWDSKKQSFVGMLTITDFINILHRYYKSALVQIYELEEHKIETWREVYLQDSFKPLVCISPNASLFDAVSSLIRNKIHRLPVIDPESGNTLYILTHKRILKFLKLFITEFPKPEFMSKSL

SEQ ID NO: 3198 - protein, 259 aa, Homo sapiens
AEAKPKFLSKAEREAEALKRRQQEVEERQRMLEEERKKRKQFQDLGRKMLEDPQERERRERRERMERETNGNEDEEGRQKIREEKDKSKELHAIKERYLGGIKKRRRTRHLNDRKFVFEWDASEDTSIDYNPLYKERHHPHQEAPGRDHLCLTQHSSCGLRASPKLPDACFSEPSHPSFQVLTLGIWGLRKTIQLPSPDPQVRRPACGAAKGEDDAVGGRESKLPQLLGPVLPFFALGLHWAISSCQAMGAASWHCSPD

SEQ ID NO: 3199 - protein, 137 aa, Homo sapiens
MKALIVLGLVLLSVTVQGKVFERCELARTLKRLGMDGYRGISLANWMCLAKWESGYNTRATNYNAGDRSTDYGIFQINSRYWCNDGKTPGAVNACHLSCSGWHGEIVVKTEMSVSMFKVVECNSRIFLLQLILSLSH

SEQ ID NO: 3200 - protein, 104 aa, Homo sapiens
MKALIVLGLVLLSVTVQGKVFERCELARTLKRLGMDGYRGISLANWMCLAKWESGYNTRATNYNAGDRSTDYGIFQINSRYWCNDGKTPGAVNACHLSCSGKTS

SEQ ID NO: 3201 - protein, 145 aa, Homo sapiens
MLTITDFINILHRYYKSALVQIYELEEHKIETWREVYLQDSFKPLVCISPNASLFDAVSSLIRNKIHRLPVIDPESGNTLYILTHKRILKFLKLFITEFPKPEFMSKSLEELQIGTYANIAMVRTTTPVYVALGIFVQHRVSALP

SEQ ID NO: 3202 - protein, 327 aa, Homo sapiens
METFDPTELPELLKLYYRRLFPYSQYYRWLNYGGGDGVIKNYFQHREFSFTLKDDIYIRYQSFNNQSDLEKEMQKMNPYKIDIGAVYSHRPNQHNTVKLGAFQAQEKELVFDIDMTDYDDVRRCCSSADICPKCWTLMTMAIRIIDRALKEDFGFKHRLWVYSGRRGVHCWVCDESVRKLSSAVRSGIVEYLSLVKGGQDVKKKVHLSEKIHPFIRKSINIIKKYFEEYALVNQDILENKESWDKILALVPETIHDELQQSFQKSHNSLQRWEHLKKVASRYQNNIKNDKYGPWLEWEIMLQYCFPRLDINVSKGINHLLKSPFSVH

SEQ ID NO: 3203 - protein, 180 aa, Homo sapiens
MGKKLYICPPSRWSPPSLGQGYVTCPSPQGDLAVICWSSEFSFIQSPHHTLQYLPENPAPAIRISAWFGPPASTPASTMSIRVTQKSYKVSTSGPRAFSSRSYTSGPGSRISSSSFSRVGSSNFRGGLGGGYGGASGMGGITAVTVNQSLLSPLVLEVDPNIQAVRTQEKEQIKTLNNKF

SEQ ID NO: 3204 - protein, 806 aa, Homo sapiens
MAKSSSLNVRVVEGRALPAKDVSGSSDPYCLVKVDDEVVARTATVWRSLGPFWGEEYTVHLPLDFHQLAFYVLDEDTVGHDDIIGKISLSREAITADPRGIDSWINLSRVDPDAEVQGEICLSVQMLEDGQGRCLRCHVLQARDLAPRDISGTSDPFARVFWGSQSLETSTIKKTRFPHWDEVLELREMPGAPSPLRVELWDWDMVGKNDFLGMVEFSPKTLQQKPPKGWFRLLPFPRAEEDSGGNLGALRVKVRLIEDRVLPSQCYQPLMELLMESVQGPAEEDTASPLALLEELTLGDCRQDLATKLVKLFLGRGLAGRFLDYLTRREVARTMDPNTLFRSNSLASKSMEQFMKLVGMPYLHEVLKPVISRVFEEKKYMELDPCKMDLGRTRRISFKGALSEEQMRETSLGLLTGYLGPIVDAIVGSVGRCPPAMRLAFKQLHRRVEERFPQAEHQQDVKYLAISGFLFLRFFAPAILTPKLFDLRDQHADPQTSRSLLLLAKAVQSIGNLGQQLGQGKELWMAPLHPFLLQCVSRVRDFLDRLVDVDGDEEAGVPARALFPPSAIVREGYLLKRKEEPAGLATRFAFKKRYVWLSGETLSFSKSPEWQMCHSIPVSHIRAVERVDEGAFQLPHVMQVVTQDGTGALHTTYLQCKNVNELNQWLSALRKASAPNPNKLAACHPGAFRSARWTCCLQAERSAAGCSRTHSAVTLGDWSDPLDPDAEAQTVYRQLLLGRDQLRLKLLEDSNMDTTLEADTGACPEVLARQRAATARLLEVLADLDRAHEEFQQQERGKAALGPLGP

SEQ ID NO: 3205 - protein, 56 aa, Homo sapiens
MNQTDKNQQEIPSYLNDEPPEESYSVNPGWSAMARSWPTATSASWVQAVLLPQPPK

SEQ ID NO: 3206 - protein, 1374 aa, Homo sapiens
MTSAAEIKKPPVAPKPKFVVANNKPAPPPIAPKPDIVISSVPQSTKKMKPAIAPKPKVLKTSPVREIGQSPSRKIMLNLEGHKQELAESTDNFNCKYEGNQSNDYISPMCSCSSECIHKLGHRENLCVKQLVLEPLEMNENLENSKIDETLTIKTRSKCDLYGEKAKNQGGVVLKASVLEEELKDALIHQMPPFISAQKHRPTDSPEMNGGCNSNGQFRIEFADLSPSPSSFEKVPDHHSCHLQLPSDECEHFETCQDDSEKSNNCFQSSELEALENGKRSTLISSDGVSKKSEVKDLGPLEIHLVPYTPKFPTPKPRKTRTARLLRQKCVDTPSESTEEPGNSDSSSSCLTENSLKINKISVLHQNVLCKQEQVDKMKLGNKSELNMESNSDAQDLVNSQKAMCNETTSFEKMAPSFDKDSNLSSDSTTVDGSSMSLAVDEGTGFIRCTVSMSLPKQLKLTCNEHLQSGRNLGVSAPQMQKESVIKEENSLRIVPKKPQRHSLPATGVLKKAASEELLEKSSYPSSEEKSSEKSLERNHLQHLCAQNRGVSSSFDMPKRASEKPVWKLPHPILPFSGNPEFLKSVTVSSNSEPSTALTKPRAKSLSAMDVEKCTKPCKDSTKKNSFKKLLSMKLSICFMKSDFQKFWSKSSQLGDTTTGHLSSGEQKGIESDWQGLLVGEEKRSKPIKAYSTENYSLESQKKRKKSRGQTSAANGLRAESLDDQMLSRESSSQAPYKSVTSLCAPEYENIRHYEEIPEYENLPFIMAIRKTQELEWQNSSSMEDADANVYEVEEPYEAPDGQLQLGPRHQHSSSGASQEEQNDLGLGDLPSDEEEIINSSDEDDVSSESSKGEPDPLEDKQDEDNGMKSKVHHIAKEIMSSEKVFVDVLKLLHIDFRDAVAHASRQLGKPVIEDRILNQILYYLPQLYELNRDLLKELEERMLHWTEQQRIADIFVKKGPYLKMYSTYIKEFDKNIALLDEQCKKNPGFAAVVREFEMSPRCANLALKHYLLKPVQRIPQYRLLLTDYLKNLIEDAGDYRDTQDALAVVIEVANHANDTMKQGDNFQKLMQIQYSLNGHHEIVQPGRVFLKEGILMKLSRKVMQPRMFFLFNDALLYTTPVQSGMYKLNNMLSLAGMKVRKPTQEAYQNELKIESVERSFILSASSATERDEWLEAISRAIEEYAKKRITFCPSRSLDEADSENKEEVSPLGSKAPIWIPDTRATMCMICTSEFTLTWRRHHCRACGKIVCQACSSNKYGLDYLKNQPARVCEHCFQELQKLDHQHSPRIGSPGNHKSPSSALSSVLHSIPSGRKQKKIPAALKEVSANTEDSSMSGYLYRSKGNKKPWKHFWFVIKNKVLYTYAASEVRSEI

SEQ ID NO: 3207 - protein, 184 aa, Homo sapiens
MFLSPGEGPATEGGGLGPGEEAPKKKHRRNRTTFTTYQLHQLERAFEASHYPDVYSREELAAKVHLPEVRVQVWFQNRRAKWRRQERLESGSGAVAAPRLPEAPALPFARPPAMSLPLEPWLGPGPPAVPGLPRLLGPGPGLQASFGPHAFAPTFADGFALEEASLRLLAKEHAQALDRAWPPA

SEQ ID NO: 3208 - protein, 210 aa, Homo sapiens; identical to SEQ ID NO: 1890

SEQ ID NO: 3209 - protein, 54 aa, Homo sapiens
MGNSASRSDFEWVYTDQPHTQRRKEILGAEDRARVLRPPAAAPLLGEGALGFCV

SEQ ID NO: 3210 - protein, 847 aa, Homo sapiens
MAQWEMLQNLDSPFQDQLHQLYSHSLLPVDIRQYLAVWIEDQNWQEAALGSDDSKATMLFFHFLDQLNYECGRCSQDPESLLLQHNLRKFCRDIQDPTQLAEMIFNLLLEEKRILIQAQRAQLEQGEPVLETPVESQQHEIESRILDLRAMMEKLVKSISQLKDQQDVFCFRYKIQAKGKTPSLDPHQTKEQKILQETLNELDKRRKEVLDASKALLGRLTTLIELLLPKLEEWKAQQQKACIRAPIDHGLEQLETWFTAGAKLLFHLRQLLKELKGLSCLVSYQDDPLTKGVDLRNAQVTELLQRLLHRAFVVETQPCMPQTPHRPLILKTGSKFTVRTRLLVRLQEGNESLTVEVSIDRNPPQLQGFRKFNILTSNQKTLTPEKGQSQGLIWDFGYLTLVEQRSGGSGKGSNKGPLGVTEELHIISFTVKYTYQGLKQELKTDTLPVVIISNMNQLSIAWASVLWFNLLSPNLQNQQFFSNPPKAPWSLLGPALSWQFSSYVGRGLNSDQLSMLRNKLFGQNCRTEDPLLSWADFTKRESPPGKLPFWTWLDKILELVHDHLKDLWNDGRIMGFVSRSQERRLLKKTMSGTFLLRFSESSEGGITCSWVEHQDDDKVLIYSVQPYTKEVLQSLPLTEIIRHYQLLTEENIPENPLRFLYPRIPRDEAFGCYYQEKVNLQERRKYLKHRLIVVSNRQVDELQQPLELKPEPELESLELELGLVPEPELSLDLEPLLKAGLDLGPELESVLESTLEPVIEPTLCMVSQTVPEPDQGPVSQPVPEPDLPCDLRHLNTEPMEIFRNCVKIEEIMPNGDPLLAGQNTVDEVYVSRPSHFYTDGPLMPSDF

SEQ ID NO: 3211 - protein, 3541 aa, Homo sapiens
MEEDIYTNLSKMETVLGQSMSSLPLSYREALERLEQSKALVSNLISTKEELMKLRQILRLLRLRCTENDGICLLKIVSALWEKWLSLLEAAKEWEMWCEELKQEWKFVSEEIEREAIILDNLQEELPEISKTKEAATTEELSELLDCLCQYGENVEKQQLLLTLLLQRIRSIQNVPESSGAVETVPAFQEITSMKERCNKLLQKVQKNKELVQTEIQERHSFTKEIIALKNFFQQTTTSFQNMAFQDHPEKSEQFEELQSILKKGKLTFENIMEKLRIKYSEMYTIVPAEIESQVEECRKALEDIDEKISNEVLKSSPSYAMRRKIEEINNGLHNVEKMLQQKSKNIEKAQEIQKKMWDELDLWHSKLNELDSEVQDIVEQDPGQAQEWMDNLMIPFQQYQQVSQRAECRTSQLNKATVKMEEYSDLLKSTEAWIENTSHLLANPADYDSLRTLSHHASTVQMALEDSEQKHNLLHSIFMDLEDLSIIFETDELTQSIQELSNQVTALQQKIMESLPQIQRMADDVVAIESEVKSMEKRVSKIKTILLSKEIFDFSPEEHLKHGEVILENIRPMKKTIAEIVSYQVELRLPQTGMKPLPVFQRTNQLLQDIKLLENVTQEQNELLKVVIKQTNEWDEEIENLKQILNNYSAQFSLEHMSPDQADKLPQLQGEIERMEKQILSLNQRKEDLLVDLKATVLNLHQHLKQEQEGVERDRLPAVTSEEGGVAERDASERKLNRRGSMSYLAAVEEEVEESSVKSDNGDEKAEPSPQSWSSLWKHDKDMEEDRASSSSGTIVQEAYGKISTSDNSMAQILTPDSLNTEQGPECSLRPNQTEEGTTPPIEADTLDSSDAQGGLEPRVEKTRPEPTEVLHACKTQVAELELWLQQANVAVEPETLNADMQQVLEQQLVGCQAMLTEIEHKVAFLLETCKDQGLGDNGATQHEAEALSLKLKTVKCNLEKVQMMLQEKHSEDQHPTILKKSSEPEHQEALQPVNLSELESIVTERPQFSRQKDFQQQQVLELKPMEQKDFIKFIEFNAKKMWPQYCQHDNDTTQESSASNQASSPENDVPDSILSPQGQNGDKWQYLHHELSSKIKLPLPQLVEPQVSTNMGILPSVTMYNFRYPTTEELKTYTTQLEDLRQEASNLQTQENMTEEAYINLDKKLFELFLTLSQCLSSVEEMLEMPRLYREDGSGQQVHYETLALELKKLYLALSDKKGDLLKAMTWPGENTNLLLECFDNLQVCLEHTQAAAVCRSKSLKAGLDYNRSYQNEIKRLYHQLIKSKTSLQQSLNEISGQSVAEQLQKADAYTVELENAESRVAKLRDEGERLHLPYALLQEVYKLEDVLDSMWGMLRARYTELSSPFVTESQQDALLQGMVELVKIGKEKLAHGHLKQTKSKVALQAQIENHKVFFQKLVADMLLIQAYSAKILPSLLQNRETFWAEQVTEVKILEEKSRQCGMKLQSLLQKWEEFDENYASLEKDLEILISTLPSVSLVEETEERLVERISFYQQIKRNIGGKHARLYQTLNEGKQLVASVSCPELEGQIAKLEEQWLSLNKKIDHELHRLQALLKHLLSYNRDSDQLTKWLESSQHTLNYWKEQSLNVSQDLDTIRSNINNFFEFSKEVDEKSSLKTAVISIGNQLLHLKETDTATLRASLAQFEQKWTMLITQLPDIQEKLHQLQMEKLPSRKAITEMISWMNNVEHQTSDEDSVHSPSSASQVKHLLQKHKEFRMEMDYKQWIVDFVNQSLLQLSTCDVESKRYERTEFAEHLGEMNRQWHRVHGMLNRKIQHLEQLLESITESENKIQILNNWLEAQEERLKTLQKPESVISVQKLLLDCQDIENQLAIKSKALDELKQSYLTLESGAVPLLEDTASRIDELFQKRSSVLTQVNQLKTSMQSVLQEWKIYDQLYDEVNMMTIRFWYCMEHSKPVVLSLETLRCQVENLQSLQDEAESSEGSWEKLQEVIGKLKGLCPSVAEIIEEKCQNTHKRWTQVNQAIADQLQKAQSLLQLWKAYSNAHGEAAARLKQQEAKFQQLANISMSGNNLAEILPPALQDIKELQHDVQKTKEAFLQNSSVLDRLPQPAESSTHMLLPGPLHSLQRAAYLEKMLLVKANEFEFVLSQFKDFGVRLESLKGLIMHEEENLDRLHQQEKENPDSFLNHVLALTAQSPDIEHLNEVSLKLPLSDVAVKTLQNMNRQWIRATATALERCSELQGIGLNEKFLYCCEKWIQLLEKIEEALKVDVANSLPELLEQQKTYKMLEAEVSINQTIADSYVTQSLQLLDTTEIENRPEFITEFSKLTDRWQNAVQGVRQRKGDVDGLVRQWQDFTTSVENLFRFLTDTSHLLSAVKGQERFSLYQTRSLIHELKNKEIHFQRRRTTCALTLEAGEKLLLTTDLKTKESVGRRISQLQDSWKDMEPQLAEMIKQFQSTVETWDQCEKKIKELKSRLQVLKAQSEDPLPELHEDLHNEKELIKELEQSLASWTQNLKELQTMKADLTRHVLVEDVMVLKEQIEHLHRQWEDLCLRVAIRKQEIEDRLNTWVVFNEKNKELCAWLVQMENKVLQTADISIEEMIEKLQKDCMEEINLFSENKLQLKQMGDQLIKASNKSRAAEIDDKLNKINDRWQHLFDVIGSRVKKLKETFAFIQQLDKNMSNLRTWLARIESELSKPVVYDVCDDQEIQKRLAEQQDLQRDIEQHSAGVESVFNICDVLLHDSDACANETECDSIQQTTRSLDRRWRNICAMSMERRMKIEETWRLWQKFLDDYSRFEDWLKSAERTAACPNSSEVLYTSAKEELKRFEAFQRQIHERLTQLELINKQYRRLARENRTDTASRLKQMVHEGNQRWDNLQRRVTAVLRRLRHFTNQREEFEGTRESILVWLTEMDLQLTNVEHFSESDADDKMRQLNGFQQEITLNTNKIDQLIVFGEQLIQKSEPLDAVLIEDELEELHRYCQEVFGRVSRFHRRLTSCTPGLEDEKEASENETDMEDPREIQTDSWRKRGESEEPSSPQSLCHLVAPGHERSGCETPVSVDSIPLEWDHTGDVGGSSSHEEDEEGPYYSALSDVEIPENPEAYLKMTTKTLKASSGKSISDGHSWHVPDSPSCPEHHYKQMEGDRNVPPVPPASSTPYKPPYGKLLLPPGTDGGKEGPRVLNGNPQQEDGGLAGITEQQSGAFDRWEMIQAQELHNKLKIKQNLQQLNSDISAITTWLKKTEAELEMLKMAKPPSDIQEIELRVKRLQEILKAFDTYKALVVSVNVSSKEFLQTESPESTELQSRLRQLSLLWEAAQGAVDSWRGGLRQSLMQCQDFHQLSQNLLLWLASAKNRRQKAHVTDPKADPRALLECRRELMQLEKELVERQPQVDMLQEISNSLLIKGHGEDCIEAEEKVHVIEKKLKQLREQVSQDLMALQGTQNPASPLPSFDEVDSGDQPPATSVPAPRAKFRAVRTTEGEEETESRVPGSTRPQRSFLSRVVRAALPLQLLLLLLLLLACLLPSSEEDYSCTQANNFARSFYPMLRYTNGPPPT

SEQ ID NO: 3212 - protein, 234 aa, Homo sapiens
MVSESDFSKDVAVQVLPLDKIEENNKQKANDIFISQYTMGQKDALRTVLKQKAQSMPVFKEVKVHLLEDAGIEKDAVTQETRISPSGIDSATTVAAATAAAIATAAPLIKVQSDLEAKVNSVTELLSKLQETDKHLQRVTEQQTSIQRKQEKLHCHDHEKQMNVFMEQHIRHLEKLQQQQIDIQTHFISAALKTSSFQPVSMPSSRAVEKYSVKPEHPNLGSCNPSLYNTFASK

SEQ ID NO: 3213 - protein, 112 aa, Homo sapiens
METLLKVLSGTLLWQLTWVRSQQPVQSPQAVILREGEDAVINCSSSKALYSVHWYRQKHGEAPVFLMILLKGGEQKGHDKISASFNEKKQQSSLYLTASQLSYSGTYFCGTE

SEQ ID NO: 3214 - protein, 366 aa, Homo sapiens
MSDYENDDECWSVLEGFRVTLTSVIDPSRITPYLRQCKVLNPDDEEQVLSDPNLVIRKRKVGVLLDILQRTGHKGYVAFLESLELYYPQLYKKVTGKEPARVFSMIIDASGESGLTQLLMTEVMKLQKKVQDLTALLSSKDDFIKELRVKDSLLRKHQERVQRLKEECEAGSRELKRCKEENYDLAMRLAHQSEEKGAALMRNRDLQLEIDQLKHSLMKAEDDCKVERKHTLKLRHAMEQRPSQELLWELQQEKALLQARVQELEASVQEGKLDRSSPYIQVLEEDWRQALRDHQEQANTIFSLRKDLRQGEARRLRCMEEKEMFELQCLALRKDSKMYKDRIEAILLQMEEVAIERDQSTQMEGL

SEQ ID NO: 3215 - protein, 306 aa, Homo sapiens
MPSSVSWGILLLAGLCCLVPVSLAEDPQGDAAQKTDTSHHDQDHPTFNKITPNLAEFAFSLYRQLAHQSNSTNIFFSPVSIATAFAMLSLGTKADTHDEILEGLNFNLTEIPEAQIHEGFQELLRTLNQPDSQLQLTTGNGLFLSEGLKLVDKFLEDVKKLYHSEAFTVNFGDTEEAKKQINDYVEKGTQGKIVDLVKELDRDTVFALVNYIFFKGKWERPFEVKDTEEEDFHVDQVTTVKVPMMKRLGMFNIQHCKKLSSWVLLMKYLGNATAIFFLPDEGKLQHLENELTHDIITKFLENEDRR

SEQ ID NO: 3216 - protein, 797 aa, Homo sapiens
MAVQGSQRRLLGSLNSTPTAIPQLGLAANQTGARCLEVSISDGLFLSLGLVSLVENALVVATIAKNRNLHSPMYCFICCLALSDLLVSGSNVLETAVILLLEAGALVARAAVLQQLDNVIDVITCSSMLSSLCFLGAIAVDRYISIFYALRYHSIVTLPRARRAVAAIWVASVVFSTLFIAYYDHVAVLLCLVVFFLAMLVLMAVLYVHMLARACQHAQGIARLHKRQRPVHQGFGLKGAVTLTILLGIFFLCWGPFFLHLTLIVLCPEHPTCGCIFKNFNLFLALIICNAIIDPLIYAFHSQELRRTLKEVLTCSCSQDRALVSWDVKSLGGSVCQELLPQQPQEKGLCDQKASSTALQRLLQKEFWEVISDEHGIDPSGNYVGDSDLQLERISVYYNEASSHKYVPRAILVDLEPGTMDSVRSGAFGHLFRPDNFIFGQSGAGNNWAKGHYTEGAELVDSVLDVVRKECENCDCLQGFQLTHSLGGGTGSGMGTLLISKVREEYPDRIMNTFSVVPSPKVSDTVVEPYNATLSIHQLVENTDETYCIDNEALYDICFRTLKLATPTYGDLNHLVSATMSGVTTSLRFPGQLNADLRKLAVNMVPFPRLHFFMPGFAPLTARGSQQYRALTVPELTQQMFDAKNMMAACDPRHGRYLTVATVFRGRMSMKEVDEQMLAIQSKNSSYFVEWIPNNVKVAVCDIPPRGLKMSSTFIGNSTAIQELFKRISEQFTAMFRRKAFLHWYTGEGMDEMEFTEAESNMNDLVSEYQQYQDATAEEEGEMYEDDEEESEAQGPK

SEQ ID NO: 3217 - protein, 317 aa, Homo sapiens
MAVQGSQRRLLGSLNSTPTAIPQLGLAANQTGARCLEVSISDGLFLSLGLVSLVENALVVATIAKNRNLHSPMYCFICCLALSDLLVSGSNVLETAVILLLEAGALVARAAVLQQLDNVIDVITCSSMLSSLCFLGAIAVDRYISIFYALRYHSIVTLPRARRAVAAIWVASVVFSTLFIAYYDHVAVLLCLVVFFLAMLVLMAVLYVHMLARACQHAQGIARLHKRQRPVHQGFGLKGAVTLTILLGIFFLCWGPFFLHLTLIVLCPEHPTCGCIFKNFNLFLALIICNAIIDPLIYAFHSQELRRTLKEVLTCSW

SEQ ID NO: 3218 - protein, 134 aa, Homo sapiens
FIAKSFYDLSAISLDGEKENCQNEEILNSLKYVRPGGGYQPTFTLVQKCEVNGQNEHPVFAYLKDKLPYPYDDPFSLMTDPKLIIWSPVRRSDVAWNFEKFLIGPEGEPFRRYSRTFPTINIEPDIKRLLKVAI

SEQ ID NO: 3219 - protein, 1262 aa, Homo sapiens
MRLLLLVPLLLAPAPGSSAPKVRRQSDTWGPWSQWSPCSRTCGGGVSFRERPCYSQRRDGGSSCVGPARSHRSCRTESCPDGARDFRAEQCAEFDGAEFQGRRYRWLPYYSAPNKCELNCIPKGENFYYKHREAVVDGTPCEPGKRDVCVDGSCRVVGCDHELDSSKQEDKCLRCGGDGTTCYPVAGTFDANDLSRGYNQILIVPMGATSILIDEAAASRNFLAVKNVRGEYYLNGHWTIEAARALPAASTILHYERGAEGDLAPERLHARGPTSEPLVIELISQEPNPGVHYEYHLPLRRPSPGFSWSHGSWSDCSAECGGGHQSRLVFCTIDHEAYPDHMCQRQPRPADRRSCNLHPCPETKRWKAGPWAPCSASCGGGSQSRSVYCISSDGAGIQEAVEEAECAGLPGKPPAIQACNLQRCAAWSPEPWGECSVSCGVGVRKRSVTCRGERGSLLHTAACSLEDRPPLTEPCVHEDCPLLSDQAWHVGTWGLCSKSCSSGTRRRQVICAIGPPSHCGSLQHSKPVDVEPCNTQPCHLPQEVPSMQDVHTPASNPWMPLGPQESPASDSRGQWWAAQEHPSARGDHRGERGDPRGDQGTHLSALGPAPSLQQPPYQQPLRSGSGPHDCRHSPHGCCPDGHTASLGPQWQGCPGAPCQQSRYGCCPDRVSVAEGPHHAGCTKSYGGDSTGGMPRSRAVASTVHNTHQPQAQQNEPSECRGSQFGCCYDNVATAAGPLGEGCVGQPSHDWAARWYFVASVGQCNRFWYGGCHGNANNFASEQECMSSCQGSLHGPRRPQPGASGRSTHTDGGGSSPAGEQEPSQHRTGAAVQRKPWPSGGLWRQDQQPGPGEAPHTQAFGEWPWGQELGSRAPGLGGDAGSPAPPFHSSSYRISLAGVEPSLVQAALGQLVRLSCSDDTAPESQAAWQKDGQPISSDRHRLQFDGSLIIHPLQAEDAGTYSCGSTRPGRDSQKIQLRIIGGDMAVLSEAELSRFPQPRDPAQDFGQAGAAGPLGAIPSSHPQPANRLRLDQNQPRVVDASPGQRIRMTCRAEGFPPPAIEWQRDGQPVSSPRHQLQPDGSLVISRVAVEDGGFYTCVAFNGQDRDQRWVQLRVLGELTISGLPPTVTVPEGDTARLLCVVAGESVNIRWSRNGLPVQADGHRVHQSPDGTLLIYNLRARDEGSYTCSAYQGSQAVSRSTEVKVVSPAPTAQPRDPGRDCVDQPELANCDLILQAQLCGNEYYSSFCCASCSRFQPHAQPIWQ

SEQ ID NO: 3220 - protein, 382 aa, Homo sapiens
MAVQGSQRRLLGSLNSTPTAIPQLGLAANQTGARCLEVSISDGLFLSLGLVSLVENALVVATIAKNRNLHSPMYCFICCLALSDLLVSGSNVLETAVILLLEAGALVARAAVLQQLDNVIDVITCSSMLSSLCFLGAIAVDRYISIFYALRYHSIVTLPRARRAVAAIWVASVVFSTLFIAYYDHVAVLLCLVVFFLAMLVLMAVLYVHMLARACQHAQGIARLHKRQRPVHQGFGLKGAVTLTILLGIFFLCWGPFFLHLTLIVLCPEHPTCGCIFKNFNLFLALIICNAIIDPLIYAFHSQELRRTLKEVLTCSCSQDRALVSWDVKSLGGSVCQELLPQQPQEKGLCDQKASSTALQRLLQKEVKSLPQAKGPGLQEPP

SEQ ID NO: 3221 - protein, 1278 aa, Homo sapiens
MRLLLLVPLLLAPAPGSSAPKVRRQSDTWGPWSQWSPCSRTCGGGVSFRERPCYSQRRDGGSSCVGPARSHRSCRTESCPDGARDFRAEQCAEFDGAEFQGRRYRWLPYYSAPNKCELNCIPKGENFYYKHREAVVDGTPCEPGKRDVCVDGSCRVVGCDHELDSSKQEDKCLRCGGDGTTCYPVAGTFDANDLSRGYNQILIVPMGATSILIDEAAASRNFLAVKNVRGEYYLNGHWTIEAARALPAASTILHYERGAEGDLAPERLHARGPTSEPLVIELISQEPNPGVHYEYHLPLRRPSPGFSWSHGSWSDCSAECGGGHQSRLVFCTIDHEAYPDHMCQRQPRPADRRSCNLHPCPETKRWKAGPWAPCSASCGGGSQSRSVYCISSDGAGIQEAVEEAECAGLPGKPPAIQACNLQRCAAWSPEPWGECSVSCGVGVRKRSVTCRGERGSLLHTAACSLEDRPPLTEPCVHEDCPLLSDQAWHVGTWGLCSKSCSSGTRRRQVICAIGPPSHCGSLQHSKPVDVEPCNTQPCHLPQEVPSMQDVHTPASNPWMPLGPQESPASDSRGQWWAAQEHPSARGDHRGERGDPRGDQGTHLSALGPAPSLQQPPYQQPLRSGSGPHDCRHSPHGCCPDGHTASLGPQWQGCPGAPCQQSRYGCCPDRVSVAEGPHHAGCTKSYGGDSTGGMPRSRAVASTVHNTHQPQAQQNEPSECRGSQFGCCYDNVATAAGPLGEGCVGQPSHAYPVRCLLPSAHGSCADWAARWYFVASVGQCNRFWYGGCHGNANNFASEQECMSSCQGSLHGPRRPQPGASGRSTHTDGGGSSPAGEQEPSQHRTGAAVQRKPWPSGGLWRQDQQPGPGEAPHTQAFGEWPWGQELGSRAPGLGGDAGSPAPPFHSSSYRISLAGVEPSLVQAALGQLVRLSCSDDTAPESQAAWQKDGQPISSDRHRLQFDGSLIIHPLQAEDAGTYSCGSTRPGRDSQKIQLRIIGGDMAVLSEAELSRFPQPRDPAQDFGQAGAAGPLGAIPSSHPQPANRLRLDQNQPRVVDASPGQRIRMTCRAEGFPPPAIEWQRDGQPVSSPRHQLQPDGSLVISRVAVEDGGFYTCVAFNGQDRDQRWVQLRVLGELTISGLPPTVTVPEGDTARLLCVVAGESVNIRWSRNGLPVQADGHRVHQSPDGTLLIYNLRARDEGSYTCSAYQGSQAVSRSTEVKVVSPAPTAQPRDPGRDCVDQPELANCDLILQAQLCGNEYYSSFCCASCSRFQPHAQPIWQ

SEQ ID NO: 3222 - protein, 132 aa, Homo sapiens
MVSESDFSKDVAVQVLPLDKIEENNKQKANDIFISQYTMGQKDALRTVLKQKAQSMPVFKEVKVHLLEDAGIEKDAVTQETRISPSGIDSATTVAAATAAAIATAAPLIKVQSDLEAKVNSVTELLSKLQET

SEQ ID NO: 3223 - protein, 1141 aa, Homo sapiens
MAGARSRDPWGASGICYLFGSLLVELLFSRAVAFNLDVMGALRKEGEPGSLFGFSVALHRQLQPRPQSWLLVGAPQALALPGQQANRTGGLFACPLSLEETDCYRVDIDQGADMQKESKENQWLGVSVRSQGPGGKIVTCAHRYEARQRVDQILETRDMIGRCFVLSQDLAIRDELDGGEWKFCEGRPQGHEQFGFCQQGTAAAFSPDSHYLLFGAPGTYNWKGTARVELCAQGSADLAHLDDGPYEAGGEKEQDPRLIPVPANSYFGFSIDSGKGLVRAEELSFVAGAPRANHKGAVVILRKDSASRLVPEVMLSGERLTSGFGYSLAVADLNSDGWPDLIVGAPYFFERQEELGGAVYVYLNQGGHWAGISPLRLCGSPDSMFGISLAVLGDLNQDGFPDIAVGAPFDGDGKVFIYHGSSLGVVAKPSQVLEGEAVGIKSFGYSLSGSLDMDGNQYPDLLVGSLADTAVLFRARPILHVSHEVSIAPRSIDLEQPNCAGGHSVCVDLRVCFSYIAVPSSYSPTVALDYVLDADTDRRLRGQVPRVTFLSRNLEEPKHQASGTVWLKHQHDRVCGDAMFQLQENVKDKLRAIVVTLSYSLQTPRLRRQAPGQGLPPVAPILNAHQPSTQRAEIHFLKQGCGEDKICQSNLQLVRARFCTRVSDTEFQPLPMDVDGTTALFALSGQPVIGLELMVTNLPSDPAQPQADGDDAHEAQLLVMLPDSLHYSGVRALDPAEKPLCLSNENASHVECELGNPMKRGAQVTFYLILSTSGISIETTELEVELLLATISEQELHPVSARARVFIELPLSIAGMAIPQQLFFSGVVRGERAMQSERDVGSKVKYEVTVSNQGQSLRTLGSAFLNIMWPHEIANGKWLLYPMQVELEGGQGPGQKGLCSPRPNILHLDVDSRDRRRRELEPPEQQEPGERQEPSMSWWPVSSAEKKKNITLDCARGTANCVVFSCPLYSFDRAAVLHVWGRLWNSTFLEEYSAVKSLEVIVRANITVKSSIKNLMLRDASTVIPVMVYLDPMAVVAEGVPWWVILLAVLAGLLVLALLVLLLWKMGFFKRAKHPEATVPQYHAVKIPREDRQQFKEEKTGTILRNNWGSPRREGPDAHPILAADGHPELGPDGHPGPGTA

SEQ ID NO: 3224 - protein, 489 aa, Homo sapiens
MNKSRWQSRRRHGRRSHQQNPWFRLRDSEDRSDSRAAQPAHDSGHGDDESPSTSSGTAGTSSVPELPGFYFDPEKKRYFRLLPGHNNCNPLTKESIRQKEMESKRLRLLQEEDRRKKIARMGFNASSMLRKSQLGFLNVTNYCHLAHELRLSCMERKKVQIRSMDPSALASDRFNLILADTNSDRLFTVNDVKVGGSKYGIINLQSLKTPTLKVFMHENLYFTNRKVNSVCWASLNHLDSHILLCLMGLAETPGCATLLPASLFVNSHPAGIDRPGMLCSFRIPGAWSCAWSLNIQANNCFSTGLSRRVLLTNVVTGHRQSFGTNSDVLAPLLFNGCRSGEIFAIDLRCGNQGKGWKATRLFHDSAVTSVRILQDEQYLMASDMAGKIKLWDLRTTKCVRQYEGHVNEYAYLPLHVHEEEGILVAVGQDCYTRIWSLHDARLLRTIPSPYPASKADIPSVAFSSRLGGSRGAPGLLMAVGQDLYCYSYS

SEQ ID NO: 3225 - protein, 148 aa, Homo sapiens
PGQVDAAMAGRIYISGMAPRPSLAKKQRFRHRNRKGYRSQRGHSRGRNQNSRRPSRATWLSLFSSEESNLGANNYDDYRMDWLVPATCEPIQSVFFFSGDKYYRVNLRTRRWQRVGFPPEKADHLQQRAATGAGEGVCSMALPQHQHP

SEQ ID NO: 3226 - protein, 1181 aa, Homo sapiens
MAGARSRDPWGASGICYLFGSLLVELLFSRAVAFNLDVMGALRKEGEPGSLFGFSVALHRQLQPRPQSWLLVGAPQALALPGQQANRTGGLFACPLSLEETDCYRVDIDQGADMQKESKENQWLGVSVRSQGPGGKIVTCAHRYEARQRVDQILETRDMIGRCFVLSQDLAIRDELDGGEWKFCEGRPQGHEQFGFCQQGTAAAFSPDSHYLLFGAPGTYNWKGTARVELCAQGSADLAHLDDGPYEAGGEKEQDPRLIPVPANSYFGLLFVTNIDSSDPDQLVYKTLDPADRLPGPAGDLALNSYLGFSIDSGKGLVRAEELSFVAGAPRANHKGAVVILRKDSASRLVPEVMLSGERLTSGFGYSLAVADLNSDGWPDLIVGAPYFFERQEELGGAVYVYLNQGGHWAGISPLRLCGSPDSMFGISLAVLGDLNQDGFPDIAVGAPFDGDGKVFIYHGSSLGVVAKPSQVLEGEAVGIKSFGYSLSGSLDMDGNQYPDLLVGSLADTAVLFRARPILHVSHEVSIAPRSIDLEQPNCAGGHSVCVDLRVCFSYIAVPSSYSPTVALDYVLDADTDRRLRGQVPRVTFLSRNLEEPKHQASGTVWLKHQHDRVCGDAMFQLQENVKDKLRAIVVTLSYSLQTPRLRRQAPGQGLPPVAPILNAHQPSTQRAEIHFLKQGCGEDKICQSNLQLVRARFCTRVSDTEFQPLPMDVDGTTALFALSGQPVIGLELMVTNLPSDPAQPQADGDDAHEAQLLVMLPDSLHYSGVRALDPAEKPLCLSNENASHVECELGNPMKRGAQVTFYLILSTSGISIETTELEVELLLATISEQELHPVSARARVFIELPLSIAGMAIPQQLFFSGVVRGERAMQSERDVGSKVKYEVTVSNQGQSLRTLGSAFLNIMWPHEIANGKWLLYPMQVELEGGQGPGQKGLCSPRPNILHLDVDSRDRRRRELEPPEQQEPGERQEPSMSWWPVSSAEKKKNITLDCARGTANCVVFSCPLYSFDRAAVLHVWGRLWNSTFLEEYSAVKSLEVIVRANITVKSSIKNLMLRDASTVIPVMVYLDPMAVVAEGVPWWVILLAVLAGLLVLALLVLLLWKMGFFKRAKHPEATVPQYHAVKIPREDRQQFKEEKTGTILRNNWGSPRREGPDAHPILAADGHPELGPDGHPGPGTA

SEQ ID NO: 3227 - protein, 122 aa, Homo sapiens
SHVSADSNRGYSRGGRKVPNLQESRYREPGTESIGKGSLWCIDPEYRQNLIQALKKTPYHPHPHVFNTPPTCPQAYQSTSGPPIWPGSTFFKRNGALLQDPDIDAASAMMLLNTPPEIQAGC

SEQ ID NO: 3228 - protein, 929 aa, Homo sapiens
MRLLLLVPLLLAPAPGSSAPKVRRQSDTWGPWSQWSPCSRTCGGGVSFRERPCYSQRRDGGSSCVGPARSHRSCRTESCPDGARDFRAEQCAEFDGAEFQGRRYRWLPYYSAPNKCELNCIPKGENFYYKHREAVVDGTPCEPGKRDVCVDGSCRVVGCDHELDSSKQEDKCLRCGGDGTTCYPVAGTFDANDLSRAVKNVRGEYYLNGHWTIEAARALPAASTILHYERGAEGDLAPERLHARGPTSEPLVIELISQEPNPGVHYEYHLPLRRPSPGFSWSHGSWSDCSAECGGGHQSRLVFCTIDHEAYPDHMCQRQPRPADRRSCNLHPCPETKRWKAGPWAPCSASCGGGSQSRSVYCISSDGAGIQEAVEEAECAGLPGKPPAIQACNLQRCAAWSPEPWGECSVSCGVGVRKRSVTCRGERGSLLHTAACSLEDRPPLTEPCVHEDCPLLSDQAWHVGTWGLCSKSCSSGTRRRQVICAIGPPSHCGSLQHSKPVDVEPCNTQPCHLPQEVPSMQDVHTPASNPWMPLGPQESPASDSRGQWWAAQEHPSARGDHRGERGDPRGDQGTHLSALGPAPSLQQPPYQQPLRSGSGPHDCRHSPHGCCPDGHTASLGPQWQGCPGAPCQQSRYGCCPDRVSVAEGPHHAGCTKSYGGDSTGGMPRSRAVASTVHNTHQPQAQQNEPSECRGSQFGCCYDNVATAAGPLGEGCVGQPSHAYPVRCLLPSAHGSCADWAARWYFVASVGQCNRFWYGGCHGNANNFASEQECMSSCQGSLHGPRRPQPGASGRSTHTDGGGSSPAGEQEPSQHRTGAAVQRKPWPSGGLWRQDQQPGPGEAPHTQAFGEWPWGQELGSRAPGLGGDAGSPAPPFHSSSYRISLAGVEPSLVQAALGQLVRLSCSDDTAPESQAAWQKDGQPISSDRFT

SEQ ID NO: 3229 - protein, 6818 aa, Homo sapiens
MASSPELPTEDEQGSWGIDDLHISLQAEQEDTQKKAFTCWINSQLARHTSPSVISDLFTDIKKGHVLLDLLEVLSGQQLPRDKGSNTFQCRINIEHALTFLRNRSIKLINIHVTDIIDGNPSIILGLIWTIILHFHIEKLAQTLSCNYNQPSLDDVSVVDSSPASSPPAKKCSKVQARWQMSARKALLLWAQEQCATYESVNVTDFKSSWRNGMAFLAIIHALRPDLIDMKSVKHRSNKDNLREAFRIAEQELKIPRLLEPEDVDVVDPDEKSIMTYVAQFLQYSKDAPGTGEEAQGKVKDAMGWLTLQKEKLQKLLKDSENDTYFKKYNSLLSFMESFNEEKKSFLDVLSIKRDLDELDKDHLQLREAWDGLDHQINAWKIKLNYALPPPLHQTEAWLQEVEELMDEDLSASQDHSQAVTLIQEKMTLFKSLMDRFEHHSNILLTFENKDENHLPLVPPNKLEEMKRRINNILEKKFILLLEFHYYKCLVLGLVDEVKSKLDIWNIKYGSRESVELLLEDWHKFIEEKEFLARLDTSFQKCGEIYKNLAGECQNINKQYMMVKSDVCMYRKNIYNVKSTLQKVLACWATYVENLRLLRACFEETKKEEIKEVPFETLAQWNLEHATLNEAGNFLVEVSNDVVGSSISKELRRLNKRWRKLVSKTQLEMNLPLMIKKQDQPTFDNSGNILSKEEKATVEFSTDMSVELPENYNQNIKAGEKHEKENEEFTGQLKVAKDVEKLIGQVEIWEAEAKSVLDQDDVDTSMEESLKHLIAKGSMFDELMARSEDMLQMDIQNISSQESFQHVLTTGLQAKIQEAKEKVQINVVKLIAALKNLTDVSPDLDIRLKMEESQKELESYMMRAQQLLGQRESPGELISKHKEALIISNTKSLAKYLKAVEELKNNVTEDIKMSLEEKSRDVCAKWESLHHELSLYVQQLKIDIEKGKLSDNILKLEKQINKEKKLIRRGRTKGLIKEHEACFSEEGCLYQLNHHMEVLRELCEELPSQKSQQEVKRLLKDYEQKIERLLKCASEIHMTLQPTAGGTSKNEGTITTSENRGGDPHSEAPFAKSDNQPSTEKAMEPTMKFSLASVLRPLQEESIMEKDYSASINSLLERYDTYRDILEHHLQNNKFRITSDFSSEEDRSSSCLQAKLTDLQVIKNETDARWKEFEIISLKLENHVNDIKKPFVIKERDTLKERERELQMTLNTRMESLETALRLVLPVEKASLLLCGSDLPLHKMAIQGFHLIDADRIYQHLRNIQDSIAKQIEICNRLEEPGNFVLKELHPFDLHAMQNIILKYKTQFEGMNHRVQRSEDTLKALEDFLASLRTAKLSAEPVTDLSASDTQVAQENTLTVKNKEGEIHLMKDKAKHLDKCLKMLDMSFKDAERGDDTSCENLLDAFSIKLSETHGYGVQEEFTEENKLLEACIFKNNELLKNIQDVQSQISKIGLKDPTVPAVKHRKKSLIRLDKVLDEYEEEKRHLQEMANSLPHFKDGREKTVNQQCQNTVVLWENTKALVTECLEQCGRVLELLKQYQNFKSILTTLIQKEESVISLQASYMGKENLKKRIAEIEIVKEEFNEHLEVVDKINQVCKNLQFYLNKMKTFEEPPFEKEANIIVDRWLDINEKTEDYYENLGRALALWDKLFNLKNVIDEWTEKALQKMELHQLTEEDRERLKEELQVHEQKTSEFSRRVAEIQFLLQSSEIPLELQVMESSILNKMEHVQKCLTGESNCHALSGSTAELREDLDQAKTQIGMTESLLKALSPSDSLEIFTKLEEIQQQILQQKHSMILLENQIGCLTPELSELKKQYESVSDLFNTKKSVLQDHFSKLLNDQCKNFNDWFSNIKVNLKECFESSETKKSVEQKLQKLSDFLTLEGRNSKIKQVDSVLKHVKKHLPKAHVKELISWLVGQEFELEKMESICQARAKELEDSLQQLLRLQDDHRNLRKWLTNQEEKWKGMEEPGEKTELFCQALARKREQFESVAQLNNSLKEYGFTEEEEIIMEATCLMDRYQTLLRQLSEIEEEDKLLPTEDQSFNDLAHDVIHWIKEIKESLMVLNSSEGKMPLEERIQKIKEIILLKPEGDARIETIMKQAESSEAPLVQKTLTDISNQWDNTLHLASTYLSHQEKLLLEGEKYLQSKEDLRLMLIELKKKQEAGFALQHGLQEKKAQLKIYKKFLKKAQDLTSLLKELKSQGNYLLECTKNPSFSEEPWLEIKHLHESLLQQLQDSVQNLDGHVREHDSYQVCVTDLNTTLDNFSKEFVSFSDKPVDQIAVEEKLQKLQELENRLSLQDGTLKKILALAKSVKQNTSSVGQKIIKDDIKSLQCKQKDLENRLASAKQEMECCLNSILKSKRSTEKKGKFTLPGREKQATSDVQESTQESAAVEKLEEDWEINKNFVENVMAVSKNCHHSMYIFESIVKNFISDEMQDSAVEMAMSKQLSLNAQESMKNTEDERKVNELQNQPLELDTMLRNEQLEEIEKLYTQLEAKKAAIKPLEQTECLNKTETGALVLHNIGYSAQHLDNLLQALITLKKNKESQYCVLRDFQEYLAAVESSMKALLTDKESLKVGPLDSVTYLDKIKKFIASIEKEKDSLGNLKIKWENLSNHVTDMDKKLLESQIKQLEHGWEQVEQQIQKKYSQQVVEYDEFTTLMNKVQDTEISLQQQQQHLQLRLKSPEERAGNQSMIALTTDLQATKHGFSVLKGQAELQMKRIWGEKEKKNLEDGINNLKKQWETLEPLHLEAENQIKKCDIRNKMKETILWAKNLLGELNPSIPLLPDDILSQIRKCKVTHDGILARQQSVESLAEEVKDKVPSLTTYEGSDLNNTLEDLRNQYQMLVLKSTQRSQQLEFKLEERSNFFAIIRKFQLMVQESETLIIPRVETAATEAELKHHHVTLEASQKELQEIDSGISTHLQELTNIYEELNVFERLFLEDQLKNLKIRTNRIQRFIQNTCNEVEHKIKFCRQFHEKTSALQEEADSIQRNELLLNQEVNKGVKEEIYNLKDRLTAIKCCILQVLKLKKVFDYIGLNWDFSQLDQLQTQVFEKEKELEEKIKQLDTFEEEHGKYQALLSKMRAIDLQIKKMTEVVLKAPDSSPESRRLNAQILSQRIEKAKCLCDEIIKKLNENKTFDDSFKEKEILQIKLNAEENDKLYKVLQNMVLELSPKELDEKNCQDKLETSLHVLNQIKSQLQQPLLINLEIKHIQNEKDNCEAFQEQVWAEMCSIKAVTAIEKQREENSSEASDVETKLREFEDLQMQLNTSIDLRTNVLNDAYENLTRYKEAVTRAVESITSLEAIIIPYRVDVGNPEESLEMPLRKQEELESTVAHIQDLTEKLGMISSPEAKLQLQYTLQELVSKNSAMKEAFKAQETEAERYLENYKCYRKMEEDIYTNLSKMETVLGQSMSSLPLSYREALERLEQSKALVSNLISTKEELMKLRQILRLLRLRCTENDGICLLKIVSALWEKWLSLLEAAKEWEMWCEELKQEWKFVSEEIEREAIILDNLQEELPEISKTKEAATTEELSELLDCLCQYGENVEKQQLLLTLLLQRIRSIQNVPESSGAVETVPAFQEITSMKERCNKLLQKVQKNKELVQTEIQERHSFTKEIIALKNFFQQTTTSFQNMAFQDHPEKSEQFEELQSILKKGKLTFENIMEKLRIKYSEMYTIVPAEIESQVEECRKALEDIDEKISNEVLKSSPSYAMRRKIEEINNGLHNVEKMLQQKSKNIEKAQEIQKKMWDELDLWHSKLNELDSEVQDIVEQDPGQAQEWMDNLMIPFQQYQQVSQRAECRTSQLNKATVKMEEYSDLLKSTEAWIENTSHLLANPADYDSLRTLSHHASTVQMALEDSEQKHNLLHSIFMDLEDLSIIFETDELTQSIQELSNQVTALQQKIMESLPQIQRMADDVVAIESEVKSMEKRVSKIKTILLSKEIFDFSPEEHLKHGEVILENIRPMKKTIAEIVSYQVELRLPQTGMKPLPVFQRTNQLLQDIKLLENVTQEQNELLKVVIKQTNEWDEEIENLKQILNNYSAQFSLEHMSPDQADKLPQLQGEIERMEKQILSLNQRKEDLLVDLKATVLNLHQHLKQEQEGVERDRLPAVTSEEGGVAERDASERKLNRRGSMSYLAAVEEEVEESSVKSDHDKDMEEDRASSSSGTIVQEAYGKISTSDNSMAQILTPDSLNTEQGPECSLRPNQTEEGTTPPIEADTLDSSDAQGGLEPRVEKTRPEPTEVLHACKTQVAELELWLQQANVAVEPETLNADMQQVLEQQLVGCQAMLTEIEHKVAFLLETCKDQGLGDNGATQHEAEALSLKLKTVKCNLEKVQMMLQEKHSEDQHPTILKKSSEPEHQEALQPVNLSELESIVTERPQFSRQKDFQQQQVLELKPMEQKDFIKFIEFNAKKMWPQYCQHDNDTTQESSARYPTTEELKTYTTQLEDLRQEASNLQTQENMTEEAYINLDKKLFELFLTLSQCLSSVEEMLEMPRLYREDGSGQQVHYETLALELKKLYLALSDKKGDLLKAMTWPGENTNLLLECFDNLQVCLEHTQAAAVCRSKSLKAGLDYNRSYQKADAYTVELENAESRVAKLRDEGERLHLPYALLQEVYKLEDVLDSMWGMLRARYTELSSPFVTESQQDALLQGMVELVKIGKEKLAHGHLKQTKSKVALQAQIENHKVFFQKLVADMLLIQAYSAKILPSLLQNRETFWAEQVTEVKILEEKSRQCGMKLQSLLQKWEEFDENYASLEKDLEILISTLPSVSLVEETEERLVERISFYQQIKRNIGGKHARLYQTLNEGKQLVASVSCPELEGQIAKLEEQWLSLNKKIDHELHRLQALLKHLLSYNRDSDQLTKWLESSQHTLNYWKEQSLNVSQDLDTIRSNINNFFEFSKEVDEKSSLKTAVISIGNQLLHLKETDTATLRASLAQFEQKWTMLITQLPDIQEKLHQLQMEKLPSRKAITEMISWMNNVEHQTSDEDSVHSPSSASQVKHLLQKHKEFRMEMDYKQWIVDFVNQSLLQLSTCDVESKRYERTEFAEHLGEMNRQWHRVHGMLNRKIQHLEQLLESITESENKIQILNNWLEAQEERLKTLQKPESVISVQKLLLDCQDIENQLAIKSKALDELKQSYLTLESGAVPLLEDTASRIDELFQKRSSVLTQVNQLKTSMQSVLQEWKIYDQLYDEVNMMTIRFWYCMEHSKPVVLSLETLRCQVENLQSLQDEAESSEGSWEKLQEVIGKLKGLCPSVAEIIEEKCQNTHKRWTQVNQAIADQLQKAQSLLQLWKAYSNAHGEAAARLKQQEAKFQQLANISMSGNNLAEILPPALQDIKELQHDVQKTKEAFLQNSSVLDRLPQPAESSTHMLLPGPLHSLQRAAYLEKMLLVKANEFENHVLALTAQSPDIEHLNEVSLKLPLSDVAVKTLQNMNRQWIRATATALERCSELQGIGLNEKFLYCCEKWIQLLEKIEEALKVDVANSLPELLEQQKTYKMLEAEVSINQTIADSYVTQSLQLLDTTEIENRPEFITEFSKLTDRWQNAVQGVRQRKGDVDGLNAHVARCGGASLKKQDLRYSLHTACGAALLCRSSHGANKEIHFQRRRTTCALTLEAGEKLLLTTDLKTKESVGRRISQLQDSWKDMEPQLAEMIKQFQSTVETWDQCEKKIKELKSRLQVLKAQSEDPLPELHEDLHNEKELIKVAIRKQEIEDRLNTWVVFNEKNKELCAWLVQMENKVLQTADISIEEMIEKLQKRTVGREEVPERWECETIVSGHGTEESCFLSIRKFHQGRGLHILTCQLIPQDCMEEINLFSENKLQLKQMGDQLIKASNKSRAAEIDDKLNKINDRWQHLFDVIGSSMADQTNSRWMFFQWPRGIQRTVTWPWDHLCSCASTGHTGPFHSSVLRCFEQHIEFGIYRRTYKVNKELGGDKNGQRCPIIYPHGLVQCIRLGEPLILKRVKKLKETFAFIQQLDKNMSNLRTWLARIESELSKPVVYDVCDDQEIQKRLAEQQDLQRDIEQHSAGVESVFNICDVLLHDSDACANETECDSIQQTTRSLDRRWRNICAMSMERRMKIEETWRLWQKFLDDYSRFEDWLKSAERTAACPNSSEVLYTSAKEELKRFERQIHERLTQLELINKQYRRLARENRTDTASRLKQMVHEGNQRWDNLQRRVTAVLRRLRHFTNQREEFEGTRESILVWLTEMDLQLTNVEHFSESDADDKMRQLNGFQQEITLNTNKIDQLIVFGEQLIQKSEPLDAVLIEDELEELHRYCQEGLEDEKEASENETDMEDPREIQTDSWRKRGESEEPSSPQSLCHLVAPGHERSGCETPVSVDSIPLEWDHTGDVGGSSSHEEDEEGPYYSALSGKSISDGHSWHVPDSPSCPEHHYKQMEGDRNVPPVPPASSTPYKPPYVSLNFTGSTAYVCAFDRWEMIQAQELHNKLKIKQNLQQLNSDISAITTWLKKTEAELEMLKMAKPPSDIQEIELRVKRLQEILKAFDTYKALVVSVNVSSKEFLQTESPESTELQSRLRQLSLLWEAAQGAVDSWRGGLRQSLMQCQDFHQLSQNLLLWLASAKNRRQKAHVTDPKADPRALLECRRELMQLEKELVERQPQVDMLQEISNSLLIKGHGEDCIEAEEKVHVIEKKLKQLREQVSQDLMALQGTQNPASPLPSFDEVDSGDQPPATSVPAPRAKFLYPAVQSSENYRRRGGDREQGPRQHTATALLPLKGGPGSPTPAAAPPAAAAPGLPAALLRRRLQLHSGQQLCPVLLPHAEVHQWATPHIEGIAGHSATPPA

SEQ ID NO: 3230 - protein, 229 aa, Homo sapiens
MFRAAAPGQLRRANLLPRVAAKLEVAPISDIIAIKSPDTFVRTIYAGNALCTVKCDEKVKVFSVRGTSFDAAATSGGSASSEKASSTSPVEISEWLDQKLTKSDRPELTGAKVVVSGGRGLKSGENFKLLYDLADQLHAAVGASRAAVDAGFVPNDMQVGQTGKIVAPELYIAVGISGAIQHLAGMKDSKTIVAINKDPEAPIFQVADYGIVADLFKVVPEMTEILKKK

SEQ ID NO: 3231 - protein, 138 aa, Homo sapiens
AGADFVMLGGMLAGHSESGGELIERDGKKYKLFYGMSSEMAMKKYAGGVAEYRASEGKTVEVPFKGDVEHTIRDILGGIRSTCTYVGAAKLKELSRRTTFIRVTQQGSCSNSVLLYLHTQNAQGTHWGGSKEANSLRK

SEQ ID NO: 3232 - protein, 333 aa, Homo sapiens
MFRAAAPGQLRRAASLLRFQSTLVIAEHANDSLAPITLNTITAATRLGGEVSCLVAGTKCDKVAQDLCKVAGIAKVLVAQHDVYKGLLPEELTPLILATQKQFNYTHICAGASAFGKNLLPRVAAKLEVAPISDIIAIKSPDTFVRTIYAGNALCTVKCDEKVKVFSVRGTSFDAAATSGGSASSEKASSTSPVEISEWLDQKLTKSDRPELTGAKVVVSGGRGLKSGENFKLLYDLADQLHAAVGASRAAVDAGFVPNDMQVGQTGKIVAPELYIAVGISGAIQHLAGMKDSKTIVAINKDPEAPIFQVADYGIVADLFKVVPEMTEILKKK

SEQ ID NO: 3233 - protein, 1112 aa, Homo sapiens
MRTSLQAVALWGQKAPPHSITAIMITDDQRTIVTGSQEGQLCLWNLSHELKISAKELLFGHSASVTCLARARDFSKQPYIVSAAENGEMCVWNVTNGQCMEKATLPYRHTAICYYHCSFRMTGEGWLLCCGEYQDVLIIDAKTLAVVHSFRSSQFPDWINCMCIVHSMRIQEDSLLVVSVAGELKVWDLSSSINSIQEKQDVYEKESKFLESLNCQTIRFCTYTERLLLVVFSKCWKVYDYCDFSLLLTEVSRNGQFFAGGEVIAAHRILIWTEDGHSYIYQLLNRWAQMGAAYKTFSGLSKSIYPADGRVLKETIYPHLLCSTSVQENKSRPFVMGYMNERKEPFYKVLFSGEVSGRITLWHIPDVPVSKFDGSPREIPVTATWTLQDNFDKHDTMSQSIIDYFSGLKDGAGTAVVTSSEYIPSLDKLICGCEDGTIIITQALNAAKARLLEGGSLVKDSPPHKVLKGHHQSVTSLLYPHGLSSKLDQSWMLSGDLDSCVILWDIFTEEILHKFFLEAGPVTSLLMSPEKFKLRGEQIICCVCGDHSVALLHLEGKSCLLHARKHLFPVRMIKWHPVENFLIVGCADDSVYIWEIETGTLERHETGERARIILNCCDDSQLVKSVLPIASETLKHKSIEQRSSSPYQLGPLPCPGLQVESSCKVTDAKFCPRPFNVLPVKTKWSNVGFHILLFDLENLVELLLPTPLSDVDSSSSFYGGEVLRRAKSTVEKKTLTLRKSKTACGPLSAEALAKPITESLAQGDNTIKFSEENDGIKRQKKMKISKKMQPKPSRKVDASLTIDTAKLFLSCLLPWGVDKDLDYLCIKHLNILKLQGPISLGISLNEDNFSLMLPGWDLCNSGMIKDYSGVNLFSRKVLDLSDKYTATLPNQVGIPRGLENNCDSLRESDTIVYLLSRLFLVNKLVNMPLELACRVGSSFRMESIHNKMRGAGNDILNMSSFYSCLRNGKNESHVPEADLSLLKLISCWRDQSVQVTEAIQAVLLAEVQQHMKSLGKIPVNSQPVSMAENGNCEMKQMLPKLEWTEELELQCVRNTLPLQTPVSPVKHDSNSNSANFQDVEDMPDRCALEESESPGEPRHHSWIAKVCPCKVS

SEQ ID NO: 3234 - protein, 289 aa, Homo sapiens
MFRAAAPGQLRRAASLLRFQSTLVIAEHANDSLAPITLNTITAATRLGGEVSCLVAGTKCDKVAQDLCKVAGIAKVLVAQHDVYKGLLPEELTPLILATQKQFNYTHICAGASAFGKNLLPRVAAKLEVAPISDIIAIKSPDTFVRTIYAGNALCTVKCDEKVKVFSVRGTSFDAAATSGGSASSEKASSTSPVEISEWLDQKLTKSDRPELTGAKVVVSGDGVSLLLPRLECNGTISAHRHLHLPGSSDSPASASRVAGITGRGLKSGENFKLLYDLADQLHAAVGAS

SEQ ID NO: 3235 - protein, 222 aa, Homo sapiens
MLQTLYDYFWWERLWLPVNLTWADLEDRDGRVYAKASDLYITLPLALLFLIVRYFFELYVATPLAALLNIKEKTRLRAPPNATLEHFYLTSGKQPKQVEVELLSRQSGLSGRQVERWFRRRRNQDRPSLLKKFREASWRFTFYLIAFIAGMAVIVDKPWFYDMKKVWEGYPIQSTIPSQYWYYMIELSFYWSLLFSIASDVKRKDFKEQIIHHVATIILISF

SEQ ID NO: 3236 - protein, 86 aa, Homo sapiens
DTKEMKKKLETKRLERIQGMTKVTTDKMAQERLKREINNSHIQEVVQVIKQMTENLERHQEKLEEKQAACLEQIREMEKQPDPAHP

SEQ ID NO: 3237 - protein, 1390 aa, Homo sapiens
MKDSNRCCCGQFTNQHIPPLPSATPSKNEEESKQVETQPEKWSVAKHTQSYPTDSYGVLEFQGGGYSNKAMYIRVSYDTKPDSLLHLMVKDWQLELPKLLISVHGGLQNFEMQPKLKQVFGKGLIKAAMTTGAWIFTGGVSTGVISHVGDALKDHSSKSRGRVCAIGIAPWGIVENKEDLVGKDVTRVYQTMSNPLSKLSVLNNSHTHFILADNGTLGKYGAEVKLRRLLEKHISLQKINTRLGQGVPLVGLVVEGGPNVVSIVLEYLQEEPPIPVVICDGSGRASDILSFAHKYCEEGGIINESLREQLLVTIQKTFNYNKAQSHQLFAIIMECMKKKELVTVFRMGSEGQQDIEMAILTALLKGTNVSAPDQLSLALAWNRVDIARSQIFVFGPHWPPLGSLAPPTDSKATEKEKKPPMATTKGGRGKGKGKKKGKVKEEVEEETDPRKIELLNWVNALEQAMLDALVLDRVDFVKLLIENGVNMQHFLTIPRLEELYNTRLGPPNTLHLLVRDVKKSNLPPDYHISLIDIGLVLEYLMGGAYRCNYTRKNFRTLYNNLFGPKRPKALKLLGMEDDEPPAKGKKKKKKKKEEEIDIDVDDPAVSRFQYPFHELMVWAVLMKRQKMAVFLWQRGEESMAKALVACKLYKAMAHESSESDLVDDISQDLDNNSKDFGQLALELLDQSYKHDEQIAMKLLTYELKNWSNSTCLKLAVAAKHRDFIAHTCSQMLLTDMWMGRLRMRKNPGLKVIMGILLPPTILFLEFRTYDDFSYQTSKENEDGKEKEEENTDANADAGSRKGDEENEHKKQRSIPIGTKICEFYNAPIVKFWFYTISYLGYLLLFNYVILVRMDGWPSLQEWIVISYIVSLALEKIREILMSEPGKLSQKIKVWLQEYWNITDLVAISTFMIGAILRLQNQPYMGYGRVIYCVDIIFWYIRVLDIFGVNKYLGPYVMMIGKMMIDMLYFVVIMLVVLMSFGVARQAILHPEEKPSWKLARNIFYMPYWMIYGEVFADQIDLYAMEINPPCGENLYDEEGKRLPPCIPGAWLTPALMACYLLVANILLVNLLIAVFNNTFFEVKSISNQVWKFQRYQLIMTFHDRPVLPPPMIILSHIYIIIMRLSGRCRKKREGDQEERDRGLKLFLSDEELKRLHEFEEQCVQEHFREKEDEQQSSSDERIRVTSERVENMSMRLEEINERETFMKTSLQTVDLRLAQLEELSNRMVNALENLAGIDRSDLIQARSRASSECEATYLLRQSSINSADGYSLYRYHFNGEELLFEDTSLSTSPGTGVRKKTCSFRIKEEKDVKTHLVPECQNSLHLSLGTSTSATPDGSHLAVDDLKNAEESKLGPDIGISKEDDERQTDSKKEETISPSLNKTDVIHGQ

SEQ ID NO: 3238 - protein, 238 aa, Homo sapiens
AQDLCKVAGIAKVLVAQHDVYKGLLPEELTPLILATQKQFNYTHICAGASAFGKNLLPRVAAKLEVAPISDIIAIKSPDTFVRTIYAGNALCTVKCDEKVKVFSVRGTSFDAAATSGGSASSEKASSTSPVEISEWLDQKLTKSDRPELTGAKVVVSGVETEVLHVGQAGLEILTSGDPPTSASQSVGITGRGLKSGENFKLLYDLADQLHAAVGASRAAVDAGFVPNDMQVGQTGKI

SEQ ID NO: 3239 - protein, 207 aa, Homo sapiens
PKCTACQESIVKDKVFKDNCCKREILALQIYCRNESRGCAEQLMLGHLLVHLKNDCHFEELPCVRPDCKEKVLRKDLRDHVEKACKYREATCSHCKSQVPMIALQKHEDTDCPCVVVSCPHKCSVQTLLRSELSAHLSECVNAPSTCSFKRYGCVFQGTNQQIKAHEASSAVQHVNLLKEWSNSLEKKGYENKESENSVPSLTDGNE

SEQ ID NO: 3240 - protein, 290 aa, Homo sapiens
SRGCAEQLMLGHLLVHLKNDCHFEELPCVRPDCKEKVLRKDLRDHVEKACKYREATCSHCKSQVPMIALQGTNQQIKAHEASSAVQHVNLLKEWSNSLEKKVSLLQNESVEKNKSIQSLHNQICSFEIEIERQKEMLRNNESKILHLQRVIDSQAEKLKELDKEIRPFRQNWEEADSMKSSVESLQNRVTELESVDKSAGQVARNTGLLESQLSRHDQMLSVHDIRLADMDLRFQVLETASYNGVLIWKIRDYKRRKQEAVMGKTLSLYSQPFYTGYFGYKMCARVYLNG

SEQ ID NO: 3241 - protein, 58 aa, Homo sapiens
MILVCDRVSEDGINRQKAQEWCIKHGFELVELSPEELPEEDDDFPESTGVKRIVQALN

SEQ ID NO: 3242 - protein, 92 aa, Homo sapiens
MELCEFAFNMKKDEVCVNPYHYQRVETPVLPPVLVPRHTEIPAEFPPLDDYSHSIPENTNFPAGIEPQSNIPETPPPGYLSEDGETSDHQMN

SEQ ID NO: 3243 - protein, 183 aa, Homo sapiens
MQELHLLWWALLLGLAQACPEPCDCGEKYGFQIADCAYRDLESVPPGFPANVTTLSLSANRLPGLPEGAFREVPLLQSLWLAHNEIRTVAAGALASLSHLKSLDLSHNLISDFAWSDLHNLSALQLLKMDSNELTFIPRDAFRSLRALRSLQLNHNRLHTLAEGTFTPLTALSHLQINENPFD

SEQ ID NO: 3244 - protein, 1526 aa, Homo sapiens
YIRVSYDTKPDSLLHLMVKDWQLELPKLLISVHGGLQNFEMQPKLKQVFGKGLIKAAMTTGAWIFTGGVSTGVISHVGDALKDHSSKSRGRVCAIGIAPWGIVENKEDLVGKDVTRVYQTMSNPLSKLSVLNNSHTHFILADNGTLGKYGAEVKLRRLLEKHISLQKINTRLGQGVPLVGLVVEGGPNVVSIVLEYLQEEPPIPVVICDGSGRASDILSFAHKIINESLREQLLVTIQKTFNYNKAQSHQLFAIIMECMKKKELVTVFRMGSEGQQDIEMAILTALLKGTNVSAPDQLSLALAWNRVDIARSQIFVFGPHWPPLGSLAPPTDSKATEKEKKPPMATTKGGRGKGKGKKKGKVKEEVEEETDPRKIELLNWVNALEQAMLDALVLDRVDFVKLLIENGVNMQHFLTIPRLEELYNTRLGPPNTLHLLVRDVKKSNLPPDYHISLIDIGLVLEYLMGGAYRCNYTRKNFRTLYNNLFGPKRPKALKLLGMEDDEPPAKGKKKKKKKKEEEIDIDVDDPAVSRFQYPFHELMVWAVLMKRQKMAVFLWQRGEESMAKALVACKLYKAMAHESSESDLVDDISQDLDNNSKDFGQLALELLDQSYKHDEQIAMKLLTYELKNWSNSTCLKLAVAAKHRDFIAHTCSQMLLTDMWMGRLRMRKNPGLKVIMGILLPPTILFLEFRTYDDFSYQTSKENEDGKEKEEENTDANADAGSRKGDEENEHKKQRSIPIGTKICEFYNAPIVKFWFYTISYLGYLLLFNYVILVRMDGWPSLQEWIVISYIVSLALEKIREILMSEPGKLSQKIKVWLQEYWNITDLVAISTFMIGAILRLQNQPYMGYGRVIYCVDIIFWYIRVLDIFGVNKYLGPYVMMIGKMMIDMLYFVVIMLVVLMSFGVARQAILHPEEKPSWKLARNIFYMPYWMIYGEVFADQIDLYAMEINPPCGENLYDEEGKRLPPCIPGAWLTPALMACYLLVANILLVNLLIAVFNNTFFEVKSISNQVWKFQRYQLIMTFHDRPVLPPPMIILSHIYIIIMRLSGRCRKKREGDQEERDRGLKLFLSDEELKRLHEFEEQCVQEHFREKEDEQQSSSDERIRVTSERVENMSMRLEEINERETFMKTSLQTVDLRLAQLEELSNRMVNALENLAGIDRSDLIQARSRASSECEATYLLRQSSINSADGYSLYRYHFNGEELLFEDTSLSTSPGTGVRKKTCSFRIKEEKDVKTHLVPECQNSLHLSLGTSTSATPDGSHLAVDDLKNAEESKLGPDIGISKEDDERQTDSKKEETISPSLNKTDVIHGQDKSDVQNTQLTVETTNIEGTISYPLEETKITRYFPDETINACKTMKSRSFVYSRGRKLVGGVNQDVEYSSITDQQLTTEWQCQVQKITRSHSTDIPYIVSEAAVQAEHKEQFADMQDEHHVAEAIPRIPRLSLTITDRNGMENLLSVKPDQTLGFPSLRSKSLHGHPRNVKSIQGKLDRSGHASSVSSLVIVSGMTAEEKKVKKEKASTETEC

SEQ ID NO: 3245 - protein, 169 aa, Homo sapiens
FVKDVRKRFPQHTIMAGNVVTGEMVEELILSGADIIKVGIGPGSVCTTRKKTGVGYPQLSAVMECADAAHGLKGHIISDGGCSCPGDVAKAFGAGADFVMLGGMLAGHSESGGELIERDGKKYKLFYGMSSEMAMKKYAGGVAEYRRCGTYHPRHPRRDPLYVYLCGSS

SEQ ID NO: 3246 - protein, 48 aa, Homo sapiens
MAKPCGVRLSGEARKQVEVFRQNLFQEILATENHIPESALARGLPQCG

SEQ ID NO: 3247 - protein, 339 aa, Homo sapiens
MDEQPRLMHSHAGVGMAGHPGLSQHLQDGAGGTEGEGGRKQDIGDILQQIMTITDQSLDEAQARKHALNCHRMKPALFNVLCEIKEKTVLSIRGAQEEEPTDPQLMRLDNMLLAEGVAGPEKGGGSAAAAAAAAASGGAGSDNSVEHSDYRAKLSQIRQIYHTELEKYEQACNEFTTHVMNLLREQSRTRPISPKEIERMVSIIHRKFSSIQMQLKQSTCEAVMILRSRFLDARRKRRNFNKQATEILNEYFYSHLSNPYPSEEAKEELAKKCGITVSQVDTLRHVISQTGGYSDGLAASQMYSPQGISANGGWQDATTPSSVTSPTEGPGSVHSDTSN

SEQ ID NO: 3248 - protein, 39 aa, Homo sapiens
MAKPCGVRLSGEARKQVEVFRQNLFQEVFSFLICKSWTQ

SEQ ID NO: 3249 - protein, 610 aa, Homo sapiens
RQARMDYSFDTTAEDPWVRISDCIKNLFSPIMSENHGHMPLQPNASLNEEEGTQGHPDGTPPKLDTANGTPKVYKSADSSTVKKGPPVAPKPAWFRQSLKGLRNRASDPRGLPDPALSTQPAPASREHLGSHIRASSSSSSIRQRISSFETFGSSQLPDKGAQRLSLQPSSGEAAKPLGKHEEGRFSGLLGRGAAPTLVPQQPEQVLSSGSPAASEARDPGVSESPPPGRQPNQKTLPPGPDPLLRLLSTQAEESQGPVLKMPSQRARSFPLTRSQSCETKLLDEKTSKLYSISSQVSSAVMKSLLCLPSSISCAQTPCIPKEGASPTSSSNEDSAANGSAETSALDTGFSLNLSELREYTEGLTEAKEDDDGDHSSLQSGQSVISLLSSEELKKLIEEVKVLDEATLKQLDGIHVTILHKEEGAGLGFSLAGGADLENKVITVHRVFPNGLASQEGTIQKGNEVLSINGKSLKGTTHHDALAILRQAREPRQAVIVTRKLTPEAMPDLNSSTDSAASASAASDVSVESTEATVCTVTLEKMSAGLGFSLEGGKGSLHGDKPLTINRIFKGVGCVWFFACSPVVGMWPGPQKASGHFLGYVVSHNSMSSS

SEQ ID NO: 3250 - protein, 1363 aa, Homo sapiens
MSSSRAQQMHAFSWIRNTLEEHPETSLPKQEVYDEYKSYCDNLGYHPLSAADFGKIMKNVFPNMKARRLGTRGKSKYCYSGLRKKAFVHMPTLPNLDFHKTGDGLEGAEPSGQLQNIDEEVISSACRLVCEWAQKVLSQPFDTVLELARFLVKSHYIGTKSMAALTVMAAAPAGMKGITQPSAFIPTAESNSFQPQVKTLPSPIDAKQQLQRKIQKKQQEQKLQSPLPGESAAKKSESATSNGVTNLPNGNPSILSPQPIGIVVAAVPSPIPVQRTRQLVTSPSPMSSSDGKVLPLNVQVVTQHMQSVKQAPKTPQNVPASPGGDRSARHRYPQILPKPANTSALTIRSPTTVLFTSSPIKTAVVPASHMSSLNVVKMTTISLTPSNSNTPLKHSASVSSATGTTEESRSVPQIKNGSVVSLQSPGSRSSSAGGTSAVEVKVEPETSSDEHPVQCQENSDEAKAPQTPSALLGQKSNTDGALQKPSNEGVIEIKATKVCDQRTKCKSRCNEMLPGTSTGNNQSTITLSVASQNLTFTSSSSPPNGDSINKDPKLCTKSPRKRLSSTLQETQVPPVKKPIVEQLSAATIEGQKQGSVKKDQKVPHSGKTEGSTAGAQIPSKVSVNVSSHIGANQPLNSSALVISDSALEQQTTPSSSPDIKVKLEGSVFLLDSDSKSVGSFNPNGWQQITKDSEFISASCEQQQDISVMTIPEHSDINDLEKSVWELEGMPQDTYSQQLHSQIQESSLNQIQAHSSDQLPLQSELKEFEPSVSQTNESYFPFDDELTQDSIVEELVLMEQQMSMNNSHSYGNCLGMTLQSQSVTPGAPMSSHTSSTHFYHPIHSNGTPIHTPTPTPTPTPTPTPTPTPTSEMIAGSQSLSRESPCSRLAQTTPVDSALGSSRHTPIGTPHSNCSSSVPPSPVECRNPFAFTPISSSMAYHDASIVSSSPVKPMQRPMATHPDKTKLEWMNNGYSGVGNSSVSGHGILPSYQELVEDRFRKPHAFAVPGQSYQSQSRHHDTHFGRLTPVSPVQHQGATVNNTNKQEGFAVPAPLDNKGTNSSASSNFRCRSVSPAVHRQRNLSGSTLYPVSNIPRSNVTPFGSPVTPEVHVFTNVHTDACANNIAQRSQSVPLTVMMQTAFPNALQKQANSKKITNVLLSKLDSDNDDAVRGLGMNNLPSNYTARMNLTQILEPSTVFPSANPQNMIDSSTSVYEFQTPSYLTKSNSTGQINFSPGDNQAQSEIGEQQLDFNSTVKDLLSGDSLQTNQQLVGQGASDLTNTASDFSSDIRLSSELSGSINDLNTLDPNLLFDPGRQQGQDDEATLEELKNDPLFQQICSESMNSMTSSGFEWIESKDHPTVEMLG

SEQ ID NO: 3251 - protein, 222 aa, Homo sapiens
MTAAVFFGCAFIAFGPALALYVFTIATEPLRIIFLIAGAFFWLVSLLISSLVWFMARVIIDNKDGPTQKYLLIFGAFVSVYIQEMFRFAYYKLLKKASEGLKSINPGETAPSMRLLAYVSGLGFGIMSGVFSFVNTLSDSLGPGTVGIHGDSPQFFLYSDLHKFLLWNKPGVSIYNPGAHGHLGILSCGRQLPKPETLPALPRQELSSLQPALQITSGNQHF

SEQ ID NO: 3252 - protein, 303 aa, Homo sapiens
MFRAAAPGQLRRAASLLRFQSTLVIAEHANDSLAPITLNTITAATRLGGEVSCLVAGTKCDKVAQDLCKVAGIAKVLVAQHDVYKGLLPEELTPLILATQKQFNYTHICAGASAFGKNLLPRVAAKLEVAPISDIIAIKSPDTFVRTIYAGNALCTVKCDEKVKVFSVRGTSFDAAATSGGSASSEKASSTSPVEISEWLDQKLTKSDRPELTGAKVVVSGVGASRAAVDAGFVPNDMQVGQTGKIVAPELYIAVGISGAIQHLAGMKDSKTIVAINKDPEAPIFQVADYGIVADLFKVVPEM

SEQ ID NO: 3253 - protein, 858 aa, Homo sapiens
MGPWGWKLRWTVALLLAAAGTAVGDRCERNEFQCQDGKCISYKWVCDGSAECQDGSDESQETCLSVTCKSGDFSCGGRVNRCIPQFWRCDGQVDCDNGSDEQGCPPKTCSQDEFRCHDGKCISRQFVCDSDRDCLDGSDEASCPVLTCGPASFQCNSSTCIPQLWACDNDPDCEDGSDEWPQRCRGLYVFQGDSSPCSAFEFHCLSGECIHSSWRCDGGPDCKDKSDEENCAVATCRPDEFQCSDGNCIHGSRQCDREYDCKDMSDEVGCVNVTLCEGPNKFKCHSGECITLDKVCNMARDCRDWSDEPIKECGTNECLDNNGGCSHVCNDLKIGYECLCPDGFQLVAQRRCEDIDECQDPDTCSQLCVNLEGGYKCQCEEGFQLDPHTKACKAVGSIAYLFFTNRHEVRKMTLDRSEYTSLIPNLRNVVALDTEVASNRIYWSDLSQRMICSTQLDRAHGVSSYDTVISRDIQAPDGLAVDWIHSNIYWTDSVLGTVSVADTKGVKRKTLFRENGSKPRAIVVDPVHGFMYWTDWGTPAKIKKGGLNGVDIYSLVTENIQWPNGITLDLLSGRLYWVDSKLHSISSIDVNGGNRKTILEDEKRLAHPFSLAVFEDKVFWTDIINEAIFSANRLTGSDVNLLAENLLSPEDMVLFHNLTQPRGVNWCERTTLSNGGCQYLCLPAPQINPHSPKFTCACPDGMLLARDMRSCLTEAEAAVATQETSTVRLKVSSTAVRTQHTTTRPVPDTSRLPGATPGLTTVEIVTMSHQALGDVAGRGNEKKPSSVRALSIVLPIVLLVFLCLGVFLLWKNWRLKNINSINFDNPVYQKTTEDEVHICHNQDGYSYPSMVSLEDDVA

SEQ ID NO: 3254 - protein, 333 aa, Homo sapiens
MTSCLPALRFIATPRLSAMPHIDNDVKLDFKDVLLRPKRSTLKSRSEVDLTRSFSFRNSKQTYSGVPIIAANMDTVGTFEMAKVLCKFSLFTAVHKHYSLVQWQEFAGQNPDCLEHLAASSGTGSSDFEQLEQILEAIPQAGNVVTGEMVEELILSGADIIKVGIGPGSVCTTRKKTGVGYPQLSAVMECADAAHGLKGHIISDGGCSCPGDVAKAFGAGADFVMLGGMLAGHSESGGELIERDGKKYKLFYGMSSEMAMKKYAGGVAEYRASEGKTVEVPFKGDVEHTIRDILGGIRSTCTYVGAAKLKELSRRTTFIRVTQQVNPIFSEAC

SEQ ID NO: 3255 - protein, 1276 aa, Homo sapiens
MSSSRAQQMHAFSWIRNTLEEHPETSLPKQEVYDEYKSYCDNLGYHPLSAADFGKIMKNVFPNMKARRLGTRGKSKYCYSGLRKKAFVHMPTLPNLDFHKTGDGLEGAEPSGQLQNIDEEVISSACRLVCEWAQKVLSQPFDTVLELARFLVKSHYIGTKSMAALTVMAAAPAGMKGITQPSAFIPTAESNSFQPQVKTLPSPIDAKQQLQRKIQKKQQEQKLQSPLPGESAAKKSESATSNGVTNLPNGNPSILSPQPIGIVVAAVPSPIPVQRTRQLVTSPSPMSSSDGKVLPLNVQVVTQHMQSVKQAPKTPQNVPASPGGDRSARHRYPQILPKPANTSALTIRSPTTVLFTSSPIKTAVVPASHMSSLNVVKMTTISLTPSNSNTPLKHSASVSSATGTTEESRSVPQIKNGSVVSLQSPGSRSSSAGGTSAVEVKVEPETSSDEHPVQCQENSDEAKAPQTPSALLGQKSNTDGALQKPSNEGVIEIKATKVCDQRTKCKSRCNEMLPGTSTGNNQSTITLSVASQNLTFTSSSSPPNGDSINKDPKLCTKSPRKRLSSTLQETQVPPVKKPIVEQLSAATIEGQKQGSVKKDQKVPHSGKTEGSTAGAQIPSKVSVNVSSHIGANQPLNSSALVISDSALEQQTTPSSSPDIKVKLEGSVFLLDSDSKSVGSFNPNGWQQITKDSEFISASCEQQQDISVMTIPEHSDINDLEKSVWELEGMPQDTYSQQLHSQIQESSLNQIQAHSSDQLPLQSELKEFEPSVSQTNESYFPFDDELTQDSIVEELVLMEQQMSMNNSHSYGNCLGMTLQSQSVTPGAPMSSHTSSTHFYHPIHSNGTPIHTPTPTPTPTPTPTPTPTPTSEMIAGSQSLSRESPCSRLAQTTPVDSALGSSRHTPIGTPHSNCSSSVPPSPVECRNPFAFTPISSSMAYHDASIVSSSPVKPMQRPMATHPDKTKLEWMNNGYSGVGNSSVSGHGILPSYQELVEDRFRKPHAFAVPGQSYQSQSRHHDTHFGRLTPVSPVQHQGATVNNTNKQEGFAVPAPLDNKGTNSSASSNFRCRSVSPAVHRQRNLSGSTLYPVSNIPRSNVTPFGSPVTPEVHVFTNVHTDACANNIAQRSQSVPLTVMMQTAFPNALQKQANSKKITNVLLSKLDSDNDDAVRGLGMNNLPSNYTARMNLTQILEPSTVFPSANPQNMIDSSTSVYEFQTPSYLTKSNSTGQINFSPGDNQAQSEIGEQQLDFNSTVKDLLSGDSLQTNQQLKYPDVLGE

SEQ ID NO: 3256 - protein, 1099 aa, Homo sapiens
MRTSLQAVALWGQKAPPHSITAIMITDDQRTIVTGSQEGQLCLWNLSHELKISAKELLFGHSASVTCLARARDFSKQPYIVSAAENGEMCVWNVTNGQCMEKATLPYRHTAICYYHCSFRMTGEGWLLCCGEYQDVLIIDAKTLAVVHSFRSSQFPDWINCMCIVHSMRIQDSLLVVSVAGELKVWDLSSSINSIQEKQDVYEKESKFLESLNCQTIRFCTYTERLLLVVFSKCWKVYDYCDFSLLLTEVSRNGQFFAGGEVIAAHRILIWTEDGHSYIYQLLNSGLSKSIYPADGRVLKETIYPHLLCSTSVQENKSRPFVMGYMNERKEPFYKVLFSGEVSGRITLWHIPDVPVSKFDGSPREIPVTATWTLQDNFDKHDTMSQSIIDYFSGLKDGAGTAVVTSSEYIPSLDKLICGCEDGTIIITQALNAAKARLLEGGSLVKDSPPHKVLKGHHQSVTSLLYPHGLSSKLDQSWMLSGDLDSCVILWDIFTEEILHKFFLEAGPVTSLLMSPEKFKLRGEQIICCVCGDHSVALLHLEGKSCLLHARKHLFPVRMIKWHPVENFLIVGCADDSVYIWEIETGTLERHETGERARIILNCCDDSQLVKSVLPIASETLKHKSIEQRSSSPYQLGPLPCPGLQVESSCKVTDAKFCPRPFNVLPVKTKWSNVGFHILLFDLENLVELLLPTPLSDVDSSSSFYGGEVLRRAKSTVEKKTLTLRKSKTACGPLSAEALAKPITESLAQGDNTIKFSEENDGIKRQKKMKISKKMQPKPSRKVDASLTIDTAKLFLSCLLPWGVDKDLDYLCIKHLNILKLQGPISLGISLNEDNFSLMLPGWDLCNSGMIKDYSGVNLFSRKVLDLSDKYTATLPNQVGIPRGLENNCDSLRESDTIVYLLSRLFLVNKLVNMPLELACRVGSSFRMESIHNKMRGAGNDILNMSSFYSCLRNGKNESHVPEADLSLLKLISCWRDQSVQVTEAIQAVLLAEVQQHMKSLGKIPVNSQPVSMAENGNCEMKQMLPKLEWTEELELQCVRNTLPLQTPVSPVKHDSNSNSANFQDVEDMPDRCALEESESPGEPRHHSWIAKVCPCKVS

SEQ ID NO: 3257 - protein, 1321 aa, Homo sapiens
MEGTHCTLQLHKPITELCYISFCLPKGEVRGFSYKGTVTLDRSNKGFHNCYQVREESDIISLSQEPDEHPGDIFFKQTPTKDILTELYKLTTERERLLTNLLSSDHILGITMGNQEGKLQELSVSLAPEDDCFQSAGDWQGELPVGPLNKRSTHGNKKPRRSSGRRESFGALPQKRTKRKGRGGRESAPLMGKDKICSSHSLPLSRTRPNLWVLEEKGNLLPNGALACSLQRRESCPPDIPKTPDTDLGFGSFETAFKDTGLGREVLPPDCSSTEAGGDGIRRPPSGLEHQQTGLSESHQDPEKHPEAEKDEMEKPAKRTCKQKPVSKVVAKVQDLSSQVQRVVKTHSKGKETIAIRPAAHAEFVPKADLLTLPGAEAGAHGSRRQGKERQGDRSSQSPAGETASISSVSASAEGAVNKVPLKVIESEKLDEAPEGKRLGFPVHTSVPHTRPETRNKRRAGLPLGGHKSLFLDLPHKVGPDSSQPRGDKKKPSPPAPAALGKVFNNSASQSSTHKQTSPVPSPLSPRLPSPQQHHRILRLPALPGEREAALNDSPCRKSRVFSGCVSADTLEPPSSAKVTETKGASPAFLRAGQPRLVPGETLEKSLGPGKTTAEPQHQSPPEYQAAILHLKREHKEEIENLQAQFELRAFHIRGEHAMITARLEETIENLKHELEHRWRGGCEERKDVCISTDDDCPPKTFRNVCVQTDRETFLKPCESESKTTRSNQLVPKKLNISSLSQLSPPNDHKDIHAALQPMEGMASNQQKALPPPPASIPPPPPLPSGLGSLSPAPPMPPVSAGPPLPPPPPPPPPLPPPSSAGPPPPPPPPPLPNSPAPPNPGGPPPAPPPPGLAPPPPPGLFFGLGSSSSQCPRKPAIEPSCPMKPLYWTRIQISDRSQNATPTLWDSLEEPDIRDPSEFEYLFSKDTTQQKKKPLSETYEKKNKVKKIIKLLDGKRSQTVGILISSLHLEMKDIQQAIFNVDDSVVDLETLAALYENRAQEDELVKIRKYYETSKEEELKLLDKPEQFLHELAQIPNFAERAQCIIFRSVFSEGITSLHRKVEIITRASKDLLHVKSVKDILALILAFGNYMNGGNRTRGQADGYSLEILPKLKDVKSRDNGINLVDYVVKYYLRYYDQEAGTEKSVFPLPEPQDFFLASQVKFEDLIKDLRKLKRQLEASEKQMVVVCKESPKEYLQPFKDKLEEFFQKAKKEHKMEESHLENAQKSFETTVRYFGMKPKSGEKEITPSYVFMVWYEFCSDFKTIWKRESKNISKERLKMAQESVSKLTSEKKVETKKINPTASLKERLRQKEASVTTN

SEQ ID NO: 3258 - protein, 505 aa, Homo sapiens
MKDSNRCCCGQFTNQHIPPLPSATPSKNEEESKQVETQPEKWSVAKHTQSYPTDSYGVLEFQGGGYSNKAMYIRVSYDTKPDSLLHLMVKDWQLELPKLLISVHGGLQNFEMQPKLKQVFGKGLIKAAMTTGAWIFTGGVSTAPCGENLYDEEGKRLPPCIPGAWLTPALMACYLLVANILLVNLLIAVFNNTFFEVKSISNQVWKFQRYQLIMTFHDRPVLPPPMIILSHIYIIIMRLSGRCRKKREGDQEERDRGLKLFLSDEELKRLHEFEEQCVQEHFREKEDEQQSSSDERIRVTSERVENMSMRLEEINERETFMKTSLQTVDLRLAQLEELSNRMVNALENLAGIDRSDLIQARSRASSECEATYLLRQSSINSADGYSLYRYHFNGEELLFEDTSLSTSPGTGVRKKTCSFRIKEEKDVKTHLVPECQNSLHLSLGTSTSATPDGSHLAVDDLKNAEESKLGPDIGISKEDDERQTDSKKEETISPSLNKTDVIHGQ

SEQ ID NO: 3259 - protein, 308 aa, Homo sapiens
LDGSDEASCPVLTCGPASFQCNSSTCIPQLWACDNDPDCEDGSDEWPQRCRGLYVFQGDSSPCSAFEFHCLSGECIHSSWRCDGGPDCKDKSDEENCAVATCRPDEFQCSDGNCIHGSRQCDREYDCKDMSDEVGCVNVTLCEGPNKFKCHSGECITLDKVCNMARDCRDWSDEPIKECDIDECQDPDTCSQLCVNLEGGYKCQCEEGFQLDPHTKACKAVGSIAYLFFTNRHEVRKMTLDRSEYTSLIPNLRNVVALDTEVASNRIYWSDLSQRMICSTQLDRAHGVSSYDTVISRDIQAPDGLAVD

SEQ ID NO: 3260 - protein, 19 aa, Homo sapiens
LYVFTIATEPLRIIFLIAG

SEQ ID NO: 3261 - protein, 160 aa, Homo sapiens
MAARGSGPRALRLLLLVQLVAGRCGLAGAAGGAQRGLSEPSSIAKHEDSLLKDLFQDYERWVRPVEHLNDKIKIKFGLAISQLVDVDEKNQLMTTNVWLKQEWIDVKLRWNPDDYGGIKVIRVPSDSVWTPDIVLFDNADGRFEGTSTKTVIRLLKIGNS

SEQ ID NO: 3262 - protein, 315 aa, Homo sapiens
MPHIDNDVKLDFKDVLLRPKRSTLKSRSEVDLTRSFSFRNSKQTYSGVPIIAANMDTVGTFEMAKVLCKFSLFTAVHKHYSLVQWQEFAGQNPDCLEHLAASSGTGSSDFEQLEQILEAIPQAGNVVTGEMVEELILSGADIIKVGIGPGSVCTTRKKTGVGYPQLSAVMECADAAHGLKGHIISDGGCSCPGDVAKAFGAGADFVMLGGMLAGHSESGGELIERDGKKYKLFYGMSSEMAMKKYAGGVAEYRASEGKTVEVPFKGDVEHTIRDILGGIRSTCTYVGAAKLKELSRRTTFIRVTQQVNPIFSEAC

SEQ ID NO: 3263 - protein, 948 aa, Homo sapiens
MGPWGWKLRWTVALLLAAAGTAVGDRCERNEFQCQDGKCISYKWVCDGSAECQDGSDESQETCLSVTCKSGDFSCGGRVNRCIPQFWRCDGQVDCDNGSDEQGCPPKTCSQDEFRCHDGKCISRQFVCDSDRDCLDGSDEASCPVLTCGPASFQCNSSTCIPQLWACDNDPDCEDGSDEWPQRCRGLYVFQGDSSPCSAFEFHCLSGECIHSSWRCDGGPDCKDKSDEENCAVATCRPDEFQCSDGNCIHGSRQCDREYDCKDMSDEVGCVNVTLCEGPNKFKCHSGECITLDKVCNMARDCRDWSDEPIKECGTNECLDNNGGCSHVCNDLKIGYECLCPDGFQLVAQRRCEDIDECQDPDTCSQLCVNLEGGYKCQCEEGFQLDPHTKACKAVGSIAYLFFTNRHEVRKMTLDRSEYTSLIPNLRNVVALDTEVASNRIYWSDLSQRMICSTQLDRAHGVSSYDTVISRDIQAPDGLAVDWIHSNIYWTDSVLGTVSVADTKGVKRKTLFRENGSKPRAIVVDPVHGFMYWTDWGTPAKIKKGGLNGVDIYSLVTENIQWPNGITLDLLSGRLYWVDSKLHSISSIDVNGGNRKTILEDEKRLAHPFSLAVFEDKVFWTDIINEAIFSANRLTGSDVNLLAENLLSPEDMVLFHNLTQPRGVNWCERTTLSNGGCQYLCLPAPQINPHSPKFTCACPDGMLLARDMRSCLTEAEAAVATQETSTVRLKVSSTAVRTQHTTTRPVPDTSRLPGATPGLTTVEIVTMSHQALGDVAGRGNEKKPSSVRALSIVLPIATELGLWSRGQLCDRACLSLQCSSSSFAWGSSFYGRTGGLRTSTASTLTTPSIRRPQRMRSTFATTRTATATPRDRWSVWRMTWREHLPGVPSLPRTLPETSPALFYSKTEKTKALPARALFYIFIHLGGRTGFGQCPCNGLGWDFGFFLSS

SEQ ID NO: 3264 - protein, 1104 aa, Homo sapiens
MASELGARDDGGCTELAKPLYLQYLERALRLDHFLRQTSAIFNRNISSDDSEDGLDDSNPLLPQSGDPLIQVKEEPPNSLLGETSGAGSSGMLNTYSLNGVLQSESKCDKGNLYNFSKLKKSRKWLKSILLSDESSEADSQSEDDDEEELNLSREELHNMLRLHKYKKLHQNKYSKDKELQQYQYYSAGLLSTYDPFYEQQRHLLGPKKKKFKEEKKLKAKLKKVKKKRRRDEELSSEESPRRHHHQTKVFAKFSHDAPPPGTKKKHLSIEQLNARRRKVWLSIVKKELPKANKQKASARNLFLTNSRKLAHQCMKEVRRAALQAQKNCKETLPRARRLTKEMLLYWKKYEKVEKEHRKRAEKEALEQRKLDEEMREAKRQQRKLNFLITQTELYAHFMSRKRDMGHDGIQEEILRKLEDSSTQRQIDIGGGVVVNITQEDYDSNHFKAQALKNAENAYHIHQARTRSFDEDAKESRAAALRAANKSGTGFGESYSLANPSIRAGEDIPQPTIFNGKLKGYQLKGMNWLANLYEQGINGILADEMGLGKTVQSIALLAHLAERENIWGPFLIISPASTLNNWHQEFTRFVPKFKVLPYWGNPHDRKVIRRFWSQKTLYTQDAPFHVVITSYQLVVQDVKYFQRVKWQYMVLDEAQALKSSSSVRWKILLQFQCRNRLLLTGTPIQNTMAELWALLHFIMPTLFDSHEEFNEWFSKDIESHAENKSAIDENQLSRLHMILKPFMLRRIKKDVENELSDKIEILMYCQLTSRQKLLYQALKNKISIEDLLQSSMGSTQQAQNTTSSLMNLVMQFRKVCNHPELFERQETWSPFHISLKPYHISKFIYRHGQIRVFNHSRDRWLRVLSPFAPDYIQRSLFHRKGINEESCFSFLRFIDISPAEMANLMLQGLLARWLALFLSLKASYRLHQLRSWGAPEGESHQRYLRNKDFLLGVNFPLSFPNLCSCPLLKSLVFSSHCKAVSGYSDQVVHQRRSATSSLRRCLLTELPSFLCVASPRVTAVPLDSYCNDRSAEYERRVLKEGGSLAAKQCLLNGAPELAADWLNRRSQFFPEPAGGLWSIRPQNGWSFIRIPGIHGLQEAYLHEA

SEQ ID NO: 3265 - protein, 169 aa, Homo sapiens
NVVALDTEVASNRIYWSDLSQRMICSTQLDRAHGVSSYDTVISRDIQAPDGLAVDWIHSNIYWTDSVLGTVSVADTKGVKRKTLFRENGSKPRAIVVDPVHGFMYWTDWGTPAKIKKGGLNGVDIYSLVTENIQWPNGITLGQSILDRYHQRSHFQCQPPHRFRCQLVG

SEQ ID NO: 3266 - protein, 775 aa, Homo sapiens
MRTSLQAVALWGQKAPPHSITAIMITDDQRTIVTGSQEGQLCLWNLSHELKISAKELLFGHSASVTCLARARDFSKQPYIVSAAENGEMCVWNVTNGQCMEKATLPYRHTAICYYHCSFRMTGEGWLLCCGEYQDVLIIDAKTLAVVHSFRSSQFPDWINCMCIVHSMRIQEDSLLVVSVAGELKVWDLSSSINSIQEKQDVYEKESKFLESLNCQTIRFCTYTERLLLVVFSKCWKVYDYCDFSLLLTEVSRNGQFFAGGEVIAAHRILIWTEDGHSYIYQLLNSGLSKSIYPADGRVLKETIYPHLLCSTSVQENKEQSRPFVMGYMNERKEPFYKVLFSGEVSGRITLWHIPDVPVSKFDGSPREIPVTATWTLQDNFDKHDTMSQSIIDYFSGLKDGAGTAVVTSSEYIPSLDKLICGCEDGTIIITQALNAAKARLLEGGSLVKDSPPHKVLKGHHQSVTSLLYPHGLSSKLDQSWMLSGDLDSCVILWDIFTEEILHKFFLEAGPVTSLLMSPEKFKLRGEQIICCVCGDHSVALLHLEGKSCLLHARKHLFPVRMIKWHPVENFLIVGCADDSVYIWEIETGTLERHETGERARIILNCCDDSQLVKSVLPIASETLKHKSIEQRSSSPYQLGPLPCPGLQVESSCKVTDAKFCPRPFNVLPVKTKWSNVGFHILLFDLENLVELLLPTPLSDVDSSSSFYGGEVLRRAKSTVEKKTLTLRKSKTACGPLSAEALAKPITESLAQGDNTIKFSEENDGIKRQKKMKIS

SEQ ID NO: 3267 - protein, 147 aa, Homo sapiens
MQELHLLWWALLLGLAQACPEPCDCGEKYGFQIADCAYRDLESVPPGFPANVTTLSLSANRLPGLPEGAFREVPLLQSLWLAHNEIRTVAAGALASLSHLKSLDLSHNLISDFAWSDLHNLSALQLLKMDSNELTFIPRDAFRSLRA

SEQ ID NO: 3268 - protein, 355 aa, Homo sapiens
WLVGFWGGSGCKEFGLCLPAGRQTQPTRWGRRLAWWTRAAWPCGSRAMVSKLSQLQTELLAALLESGLSKEALIQALGEPGPYLLAGEGPLDKGESCGGGRGELAELPNGLGETRGSEDETDDDGEDFTPPILKELENLSPEEAAHQKAVVETLLQEDPWRVAKMVKSYLQQHNIPQREVVDTTGLNQSHLSQHLNKGTPMKTQKRAALYTWYVRKQREVAQQFTHAGQGGLIEEPTGDELPTKKGRRNRFKWGPASQQILFQAYERQKNPSKEERETLVEECNRAECIQRGVSPSQPQPAEYRSQAGLSSWGPPPPCQHPDSTAQLGADIPRPQPAAPEPHHGLTSWGHDHRAW

SEQ ID NO: 3269 - protein, 1181 aa, Homo sapiens
MSLLNPVLLPPKVKAYLSQGERFIKWDDETTVASPVILRVDPKGYYLYWTYQSKEMEFLDITSIRDTRFGKFAKMPKSQKLRDVFNMDFPDNSFLLKTLTVVSGPDMVDLTFHNFVSYKENVGKAWAEDVLALVKHPLTANASRSTFLDKILVKLKMQLNSEGKIPVKNFFQMFPADRKRVEAALSACHLPKGKNDAINPEDFPEPVYKSFLMSLCPRPEIDEIFTSYHAKAKPYMTKEHLTKFINQKQRDSRLNSLLFPPARPDQVQGLIDKYEPSGINAQRGQLSPEGMVWFLCGPENSVLAQDKLLLHHDMTQPLNHYFINSSHNTYLTAGQFSGLSSAEMYRQVLLSGCRCVELDCWKGKPPDEEPIITHGFTMTTDIFFKEAIEAIAESAFKTSPYPIILSFENHVDSPRQQAKMAEYCRTIFGDMLLTEPLEKFPLKPGVPLPSPEDLRGKILIKNKKNQFSGPTSSSKDTGGEAEGSSPPSAPAVWAGEEGTELEEEEVEEEEEEESGNLDEEEIKKMQSDEGTAGLEVTAYEEMSSLVNYIQPTKFVSFEFSAQKNRSYVISSFTELKAYDLLSKASVQFVDYNKRQMSRIYPKGTRMDSSNYMPQMFWNAGCQMVALNFQTMDLPMQQNMAVFEFNGQSGYLLKHEFMRRPDKQFNPFSVDRIDVVVATTLSITVISGQFLSERSVRTYVEVELFGLPGDPKRRYRTKLSPSTNSINPVWKEEPFVFEKILMPELASLRVAVMEEGNKFLGHRIIPINALNSGYHHLCLHSESNMPLTMPALFIFLEMKDYIPGAWADLTVALANPIKFFSAHDTKSVKLKEAMGGLPEKPFPLASPVASQVNGALAPTSNGSPAARAGAREEAMKEAAEPRTASLEELRELKGVVKLQRRHEKELRELERRGARRWEELLQRGAAQLAELGPPGVGGVGACKLGPGKGSRKKRSLPREESAGAAPGEGPEGVDGRVRELKDRLELELLRQGEEQYECVLKRKEQHVAEQISKMMELAREKQAAELKALKETSENDTKEMKKKLETKRLERIQGMTKVTTDKMAQERLKREINNSHIQEVVQVIKQMTENLERHQEKLEEKQAACLEQIREMEKQFQKEALAEYEARMKGLEAEVKESVRACLRTCFPSEAKDKPERACECPPELCEQDPLIAKADAQESRL

SEQ ID NO: 3270 - protein, 211 aa, Homo sapiens
QRVARPRAQETLQEVHRFVVREYLARALRPRERFRGMERMHGSQKMSLDAQAISDTFQGLGSEATWLDQAIQCVAEILGETYKDDIQRHLETLIRSYPDIRRDHILAILALRRLGRQRNQHLLQHTQDLLRAAAGAAGAEAPRGRVLFEEIKPSAAVRPEGAAVQEAFQASLRGVFWGRRALNAAYRAGGGLPPDCPASPSSLKVKSRVFI

SEQ ID NO: 3271 - protein, 427 aa, Homo sapiens
MTSCLPALRFIATPRLSAMPHIDNDVKLDFKDVLLRPKRSTLKSRSEVDLTRSFSFRNSKQTYSGVPIIAANMDTVGTFEMAKVLCKFSLFTAVHKHYSLVQWQEFAGQNPDCLEHLAASSGTGSSDFEQLEQILEAIPQVKYICLDVANGYSEHFVEFVKDVRKRFPQHTIMAGNVVTGEMVEELILSGADIIKVGIGPGSVCTTRKKTGVGYPQLSAVMECADAAHGLKGHIISDGGCSCPGDVAKAFGAGADFVMLGGMLAGHSESGGELIERDGKKYKLFYGMSSEMAMKKYAGGVAEYRYVWRPRSLVIVWRQNSWLLRGGWYSSQRSMVNRGSMLGSVEKSLGLRNPEGEDNKVFPTLRASEGKTVEVPFKGDVEHTIRDILGGIRSTCTYVGAAKLKELSRRTTFIRVTQQVNPIFSEAC

SEQ ID NO: 3272 - protein, 860 aa, Homo sapiens [sequence omitted]

SEQ ID NO: 3273 - protein, 854 aa, Homo sapiens
METSQETSLFLVKILEELDSKQNTVSYQDLCKSLCARFDLSQLAKLRSVLFYTACLDPNFPATLFKDKMKCTVNNQQSKKIMVAADIVTIFNLIQMNGGAAKEKLPTGRQKVRKKEASFESCRSDTEICNAAECEPLNCELSERSFSRGYPIRQSSKCRKMDCKDCPQFVPASEPNFLLGVSKEVKNRAASLDRLQALAPYSVTSPQPCEMQRTYFPMNIENESISDQDSLPINQSIKETFISNEEPFVVQSCVQKRNIFKEDFHNLMAVSPSLVGPISKAENEHREPQSRKEPHKPPFFNHSFEMPYNSQYLNPVYSPVPDKRRAKHESLDDLQASTYFGPTPVMGTQEARRCLGKPNKQTPWPAKSWSLNTEEVPDFERSFFNRNPSEEKLHYPNASSQTPNFPAPERRPTYLVPKDQQPILPIAYAAKQNGLKSKEISSPVDLEKHEPVKKFKDKSINCTSGQLSSDTSSVGTQTEHVLEPKKCRDLCTSGQGKYSDRHTMKHSDDDSEIVSDDISDIFRFLDDMSISGSTGVIQSSCYNSTGSLSQLHKSDCDSSPEHNLTKIANGVPNSKGDKGNRPENTHHSEEELKTSVCKLVLRIGEIERKLESLSGVRDEISQVLGKLNKLDQKMQQPEKVSVQIDLNSLTSEGPSDDSASPRMFHAHSGSHGPKLENNPDWCCSDASGSNSESLRVKALKKSLFTRPSSRSLTEENSATESKIASISNSPRDWRTITYTNRVGLNEEEIKDTGPGDNKDWHRKSKEADRQYDIPPQHRLPKQPKDGFLVEQVFSPHPYPASLKAHMKSNPLYTDMRLTELAEVKRGQPSWTIEEYARNAGDKGKLTALDLQHVG

SEQ ID NO: 3274 - protein, 125 aa, Homo sapiens
MAGNVVTGEMVEELILSGADIIKVGIGPGSVCTTRKKTGVGYPQLSAVMECADAAHGLKGHIISDGGCSCPGDVAKAFGAGADFVMLGGMLAGHSESGGELIERDGKKYKLFYGMSSEMAMKKYA

SEQ ID NO: 3275 - protein, 121 aa, Homo sapiens
MGFSSELCSPQGHGVLQQMQEAELRLLEGMRKWMAQRVKSDREYAGLLHHMSLQDSGGQSRAISPDSPISQVGLYGTLVGAGCICLLLPLLGALWGSGWRSGRPMLGSHCAPLPASPICAV

SEQ ID NO: 3276 - protein, 377 aa, Homo sapiens
MLQTLYDYFWWERLWLPVNLTWADLEDRDGRVYAKASDLYITLPLALLFLIVRYFFELYVATPLAALLNIKEKTRLRAPPNATLEHFYLTSGKQPKQSGLSGRQVERWFRRRRNQDRPSLLKKFREASWRFTFYLIAFIAGMAVIVDKPWFYDMKKVWEGYPIQSTIPSQYWYYMIELSFYWSLLFSIASDVKRKDFKEQIIHHVATIILISFSWFANYIRAGTLIMALHDSSDYLLESAKMFNYAGWKNTCNNIFIVFAIVFIITRLVILPFWILHCTLVYPLELYPAFFGYYFFNSMMGVLQLLHIFWAYLILRMAHKFITGKELGGVASPETSGQGSTIRKTQFLRKRQFKKGWEEGCPLKKTSSAFNGPTATE

SEQ ID NO: 3277 - protein, 153 aa, Homo sapiens
EPNAHRKDGTRLGLGSLRQAFSRASQRALTQVSKEDTGLFRRSSCSLFRSFRQALNDGPATGHSQATPEVPSGVMNGVSQQASTGAASEELKPEAVLTSWAPRGWRCPPSRCLRSWRRTCGPDWRATTPASWRPRSQAASTASCSWSRVTGRP

SEQ ID NO: 3278 - protein, 253 aa, Homo sapiens
ATQKQFNYTHICAGASAFGKNLLPRVAAKLEVAPISDIIAIKSPDTFVRTIYAGNALCTVKCDEKVKVFSVRGTSFDAAATSGGSASSEKASSTSPVEISEWLDQKLTKSDRPELTGAKVVVSGGRGLKSGENFKLLYDLADQLHAAVGASRAAVDAGFVPNDMQVGQTGKIVAPELYIAVGISGAIQHLAGMKDSKTIVAINKDPEAPIFQVADYGIVADLFKPPWTALLCPSSHKAALHWKLQLQPLHCHD

SEQ ID NO: 3279 - protein, 80 aa, Homo sapiens
ANLQLFWNMYNRPAPTQRAARGWARSTTPWRCPVEALDPADDAHVEAPPPSLRRLMFPLVYFCEGKGEEMGFCLKKMRGS

SEQ ID NO: 3280 - protein, 533 aa, Homo sapiens
MMSEGKPPDKKRPRRSLSISKNKKKASNSIISCFNNAPPAKLACPVCSKMVPRYDLNRHLDEMCANNDFVQVDPGQVGLINSNVSMVDLTSVTLEDVTPKKSPPPKTNLTPGQSDSAKREVKQKISPYFKSNDVVCKNQDELRNRSVKVICLGSLASKLSRKYVKAKKSIDKDEEFAGSSPQSSKSTVVKSLIDNSSEIEDEDQILENSSQKENVFKCDSLKEECIPEHMVRGSKIMEAESQKATRECEKSALTPGFSDNAIMLFSPDFTLRNTLKSTSEDSLVKQECIKEVVEKREACHCEEVKMTVASEAKIQLSDSEAKSHSSADDASAWSNIQEAPLQDDSCLNNDIPHSIPLEQGSSCNGPGQTTGHPYYLRSFLVVLKTVLENEDDMLLFDEQEKGIVTKFYQLSATGQKLYVRLFQRKLSWIKMTKLEYEEIALDLTPVIEELTNAGFLQTESELQELSEVLELLSAPELKSLAKTFHLVNPNGQKQQLVDAFLKLAKQRSVCTWGKNKPGIGAVILKRFCWLLLQ

SEQ ID NO: 3281 - protein, 33 aa, Homo sapiens
LLCAEMPKKAGATTKASSRVKARARNQRDHFLP

SEQ ID NO: 3282 - protein, 553 aa, Homo sapiens
MDSPGYNCFVDKDKMDAAIQDLGPKELSCTELQELKQLARQGYWAQSHALRGKVYQRLIRDIPCRTVTPDASVYSDIVGKIVGKHSSSCLPLPEFVDNTQVPSYCLNARGEGAVRKILLCLANQFPDISFCPALPAVVALLLHYSIDEAECFEKACRILACNDPGRRLIDQSFLAFESSCMTFGDLVNKYCQAAHKLMVAVSEDVLQVYADWQRWLFGELPLCYFARVFDVFLVEGYKVLYRVALAILKFFHKVRAGQPLESDSVKQDIRTFVRDIAKTVSPEKLLEKAFAIRLFSRKEIQLLQMANEKALKQKGITVKQKRQFVHLAVHAENFRSEIVSVREMRDIWSWVPERFALCQPLLLFSSLQHGYSLARFYFQCEGHEPTLLLIKTTQKEVCGAYLSTDWSERNKFGGKLGFFGTGECFVFRLQPEVQRYEWVVIKHPELTKPPPLMAAEPTAPLSHSASSDPADRLSPFLAARHFNLPSKTESMFMAGGSDCLIVGGGGGQALYIDGDLNRGRTSHCDTFNNQPLCSENFLIAAVEAWGFQDPDTQ

SEQ ID NO: 3283 - protein, 145 aa, Homo sapiens
RHLRATPNTRGSARLLCAEMPKKAGATTKGKSQSKEPERPLPPLGPVAVDPKGCVTIAIHAKPGSKQNAVTDLTAEAVNVAIAAPPSEGEANAELCRYLSKVLELRKSDVVLDKKLRDLLKIVPCKLATRTQILGLLVECSFSRL

SEQ ID NO: 3284 - protein, 507 aa, Homo sapiens
MASGDLYEVERIVDKRKNKKGKWEYLIRWKGYGSTEDTWEPEHHLLHCEEFIDEFNGLHMSKDKRIKSGKQSSTSKLLRDSRGPSVEKLSHRPSDPGKSKGTSHKRKRINPPLAKPKKGYSGKPSSGGDRATKTVSYRTTPSGLQIMPLKKSQNGMENGDAGSEKDERHFGNGSHQPGLDLNDHVGEQDMGECDVNHATLAENGLGGSALTNGGLNLHSPVKRKLEAEKDYVFDKRLRYSVRQNESNCRFRDIVVRKEEGFTHILLSSQTSDNNALTPEIMKEVRRALCNAATDDSKLLLLSAVGSVFCSGLDYSYLIGRLSSDRRKESTRIAEAIRDFVKAFIQFKKPIVVAINGPALGLGASILPLCDIVWASEKAWFQTPYATIRLTPAGCSSYTFPQILGVALANEMLFCGRKLTAQEACSRGLVSQVFWPTTFSQEVMLRVKEMASCSAVVLEESKCLVRSFLKSVLEDVNEKECLMLKQLWSSSKGLDSLFSYLQDKIYEV

SEQ ID NO: 3285 - protein, 189 aa, Homo sapiens
MADLDSPPKLSGVQQPSEGVGGGRCSEISAELIRSLTELQELEAVYERLCGEEKVVERELDALLEQQNTIESKMVTLHRMGPNLQLIEGDAKQLAGMITFTCNLAENVSSKVRQLDLAKNRLYQAIQRADDILDLKFCMDGVQTALRSEDYEQAAAHTHRYLCLDKSVICPRWSASSRSSHCWVCMRRD

SEQ ID NO: 3286 - protein, 1077 aa, Homo sapiens
PYKPQWCRSREAWALYLFSPQNRFRVSCQKVITHKMFDHVVLVFIFLNCVTIALERPDIDPGSTERVFLSVSNYIFTAIFVAEMMVKVVALGLLSGEHAYLQSSWNLLDGLLVLVSLVDIVVAMASAGGAKILGVLRVLRLLRTLRPLRVISRAPGLKLVVETLISSLRPIGNIVLICCAFFIIFGILGVQLFKGKFYYCEGPDTRNISTKAQCRAAHYRWVRRKYNFDNLGQALMSLFVLSSKDGWVNIMYDGLDAVGVDQQPVQNHNPWMLLYFISFLLIVSFFVLNMFVGVVVENFHKCRQHQEAEEARRREEKRLRRLERRRRKAQRRPYYADYSPTRRSIHSLCTSHYLDLFITFIICVNVITMSMEHYNQPKSLDEALKYCNYVFTIVFVFEAALKLVAFGFRRFFKDRWNQLDLAIVLLSLMGITLEEIEMSAALPINPTIIRIMRVLRIARVLKLLKMATGMRALLDTVVQALPQVGNLGLLFMLLFFIYAALGVELFGRLECSEDNPCEGLSRHATFSNFGMAFLTLFRVSTGDNWNGIMKDTLRECSREDKHCLSYLPALSPVYFVTFVLVAQFVLVNVVVAVLMKHLEESNKEAREDAELDAEIELEMAQGPGSARRVDADRPPLPQESPGARDAPNLVARKVSVSRMLSLPNDSYMFRPVVPASAPHPRPLQEVEMETYGAGTPLESCASLQIPLAVSSPARSGEPLHALSPRGTARSPSLSRLLCRQEAVHTDSLEGKIDSPRDTLDPAEPGEKTPVRPVTQGGSLQSPPRSPRPASVRTRKHTFGQRCVSSRPAAPGGEEAEASDPADEEVSHITSSACPWQPTAEPHGPEASPVAGGERDLRRLYSVDAQGFLDKPGRADEQWRPSAELGSGEPGEAKAWGPEAEPALGARRKKKMSPPCISVEPPAEDEGSARPSAAEGGSTTLRRRTPSCEATPHRDSLEPTEGSGAGGDPAAKGERWGQASCRAEHLTVPSFAFEPLDLGVPSGDPFLDGSHSVTPESRASSSGAIVPLEPPESEPPMPVGDPPEKRRGLYLTVPQCPLEKPGSPSATPAPGGGADDPV

SEQ ID NO: 3287 - protein, 1245 aa, Homo sapiens
MLGWVQRVLPQPPGTPRKTKMQEEEEVEPEPEMEAEVEPEPNPEEAETESESMPPEESFKEEEVAVADPSPQETKEAALTSTISLRAQGAEISEMNSPSRRVLTWLMKGVEKVIPQPVHSITEDPAQILGHGSTGDTGCTDEPNEALEAQDTRPGLRLLLWLEQNLERVLPQPPKSSEVWRDEPAVATAPPGRPQEMGPKLQARETPSLPTPIPLQPKEEPKEAPAPEPQPGSQAQTSSLPPTRDPARLVAWVLHRLEMALPQPVLHGKIGEQEPDSPGICDVQTISILPGGQVEPDLVLEEVEPPWEDAHQDVSTSPQGTEVVPAYEEENKAVEKMPRELSRIEEEKEDEEEEEEEEEEEEEEEVTEVLLDSCVVSQVGVGQSEEDGTRPQSTSDQKLWEEVGEEAKKEAEEKAKEEAEEVAEEEAEKEPQDWAETKEEPEAEAEAASSGVPATKQHPEVQVEDTDADSCPLMAEENPPSTVLPPPSPAKSDTLIVPSSASGTHRKKLPSEDDEAEELKALSPAESPVVAWSDPTTPKDTDGQDRAASTASTNSAIINDRLQELVKLFKERTEKVKEKLIDPDVTSDEESPKPSPAKKAPEPAPDTKPAEAEPVEEEHYCDMLCCKFKHRPWKKYQFPQSIDPLTNLMYVLWLFFVVMAWNWNCWLIPVRWAFPYQTPDNIHHWLLMDYLCDLIYFLDITVFQTRLQFVRGGDIITDKKDMRNNYLKSRRFKMDLLSLLPLDFLYLKVGVNPLLRLPRCLKYMAFFEFNSRLESILSKAYVYRVIRTTAYLLYSLHLNSCLYYWASAYQGLGSTHWVYDGVGNSYIRCYYFAVKTLITIGGLPDPKTLFEIVFQLLNYFTGVFAFSVMIGQMRDVVGAATAGQTYYRSCMDSTVKYMNFYKIPKSVQNRVKTWYEYTWHSQGMLDESELMVQLPDKMRLDLAIDVNYNIVSKVALFQGCDRQMIFDMLKRLRSVVYLPNDYVCKKGEIGREMYIIQAGQVQVLGGPDGKSVLVTLKAGSVFGEISLLAVGGGNRRTANVVAHGFTNLFILDKKDLNEILVHYPESQKLLRKKARRMLRSNNKPKEEKSVLILPPRAGTPKLFNAALAMTGKMGGKGAKGGKLAHLRARLKELAALEAAAKQQELVEQAKSSQDVKGEEGSAAPDQHTHPKEAATDPPAPRTPPEPPGSPPSSPPPASLGRPEGEEEGPAEPEEHSVRICMSPGPEPGEQILSVKMPEEREEKAE

SEQ ID NO: 3288 - protein, 249 aa, Homo sapiens
RTAGKELALAPLQDWGEETEDGAVYSVSLRRQRSQRRSPAEGPGGSQAPSPIANTFLHYRTSKVRVLRAARLERLVGELVFGDREQDPSFMPAFLATYRTFVPTACLLGFLLPPMPPPPPPGVEIKKTAVQDLSFNKNLRAVVSVLGSWLQDHPQDFRDHPAHSDLGSVRTFLGWAAPGSAEAQKAEKLLEDFLEEAEREQEEEPPQDLPELPKLLTQTLQRPARRKRKGSCLKVPSSWTSAWTRWPSS

SEQ ID NO: 3289 - protein, 223 aa, Homo sapiens
MARSGSATPPARAPGAPPRSPPQRLDVSGPLRELRPRLCHLRKGPQGYGFNLHSDKSRPGQYIRSVDPGSPAARSGLRAQDRLIEVNGQNVEGLRHAEVVASIKAREDEARLLVVDPETDEHFKRLRVTPTEEHVEGPLPSPVTNGTSPAQLNGGSACSSRSDLPGSDKDTEDGSAWKQDPFQESGLHLSPTAAEAKEKARAMRVNKRAPQMDWNRKREIFSN

SEQ ID NO: 3290 - protein, 891 aa, Homo sapiens
MTVSTDNLLVNKAISKSGQLPTSSNLEANISCSLNELTYNNLPANENQNLKEQNQTEKSLKSPSDTLDGRNENLQESEILSQPKSLSLEATSPLSAEKHSCTVPEGLLFPAEYYVRTTRSMSNCQRKVAVEAVIQSHLDVKKKGFKNKNKDASKNLNLSNEETDQSEIRMSGTCTGQPSSRTSQKLLSLTKVSSPAGPTEDNDLSRKAVAQAPGRRYTGKRKSACTPASDHCEPLLPTSSLSIVNRSKEEVTSHKYQHEKLFIQVKGKKSRHQKEDSLSWSNSAYLSLDDDAFTAPFHRDGMLSLKQLLSFLSITDFQLPDEDFGPLKLEKVKSCSEKPVEPFESKMFGERHLKEGSCIFPEELSPKRMDTEMEDLEEDLIVLPGKSHPKRPNSQSQHTKTGLSSSILLYTPLNTVAPDDNDRPTTDMCSPAFPILGTTPAFGPQGSYEKASTEVAGRTCCTPQLAHLKDSVCLASDTKQFDSSGSPAKPHTTLQVSGRQGQPTCDCDSVPPGTPPPIESFTFKENQLCRNTCQELHKHSVEQTETAELPASDSINPGNLQLVSELKNPSGSCSVDVSAMFWERAGCKEPCIITACEDVVSLWKALDAWQWEKLYTWHFAEVPVLQIVPVPDVYNLVCVALGNLEIREIRALFCSSDDESEKQVLLKSGNIKAVLGLTKRRLVSSSGTLSDQQVEVMTFAEDGGGKENQFLMPPEETILTFAEVQGMQEALLGTTIMNNIVIWNLKTGQLLKKMHIDDSYQASVCHKAYSEMGLLFIVLSHPCAKESESLRSPVFQLIVINPKTTLSVGVMLYCLPPGQAGRFLEGDVKDHCAAAILTSGTIAIWDLLLGQCTALLPPVSDQHWSFVKWSGTDSHLLAGQKDGNIFVYHYS

SEQ ID NO: 3291 - protein, 84 aa, Homo sapiens
MKVKVIPVLEDNYMYLVIEELTREAVAVDVAVPKRGPRAGKPGAGAASSRAGGAGRGRAHLLADAQAGARRGAAEGVLRPRAHA

SEQ ID NO: 3292 - protein, 141 aa, Homo sapiens
MSEARKGPDEAEESQYDSGIESLRSLRSLPESTSAPASGPSDGSPQPCTHPPGPVKEPQEKEDADGERADSTYGSSSLTYTLSLLGGPEAEDPAPRLPLPHVGALSPQQLEALTYISEDGDTQHSIWLYIWTNRAQFGHWC

SEQ ID NO: 3293 - protein, 416 aa, Homo sapiens
MLENFGNLTALGYPVPKPALISLLERGDMAWGLEAQDDPPAERTKNVCKDVETNIDSESTLIQGISEERDGMMSHGQLKSVPQRTDFPETRNVEKHQDIPTVKNIQGKVPRIPCARKPFICEECGKSFSYFSYYARHQRIHTGEKPFECSECGKAFNGNSSLIRHQRIHTGERPYQCEECGRAFNDNANLIRHQRIHSGDRPYYCTECGNSFTSSSEFVIHQRIHTGEKPYECNECGKAFVGNSPLLRHQKIHTGEKPYECNECGKSFGRTSHLSQHQRIHTGEKPYSCKVCGQAFNFHTKLTRHQRIHSEEKPFDCVDCGKAFSAQEQLKRHLRIHTQESSYVCDECGKALTSKRNLHQHQRIHTGEKPYECSKYEKAFGTSSQLGHLEHVYSGEKPVLDICRFGLPEFFTPFYW

SEQ ID NO: 3294 - protein, 1099 aa, Homo sapiens
PYKPQWCRSREAWALYLFSPQNRFRVSCQKVITHKMFDHVVLVFIFLNCVTIALERPDIDPGSTERVFLSVSNYIFTAIFVAEMMVKVVALGLLSGEHAYLQSSWNLLDGLLVLVSLVDIVVAMASAGGAKILGVLRVLRLLRTLRPLRVISRAPGLKLVVETLISSLRPIGNIVLICCAFFIIFGILGVQLFKGKFYYCEGPDTRNISTKAQCRAAHYRWVRRKYNFDNLGQALMSLFVLSSKDGWVNIMYDGLDAVGVDQQPVQNHNPWMLLYFISFLLIVSFFVLNMFVGVVVENFHKCRQHQEAEEARRREEKRLRRLERRRRSKALPVAVAVAEAQRRPYYADYSPTRRSIHSLCTSHYLDLFITFIICVNVITMSMEHYNQPKSLDEALKYCNYVFTIVFVFEAALKLVAFGFRRFFKDRWNQLDLAIVLLSLMGITLEEIEMSAALPINPTIIRIMRVLRIARVLKLLKMATGMRALLDTVVQALPQVGNLGLLFMLLFFIYAALGVELFGRLECSEDNPCEGLSRHATFSNFGMAFLTLFRVSTGDNWNGIMKDTLRECSREDKHCLSYLPALSPVYFVTFVLVAQFVLVNVVVAVLMKHLEESNKEAREDAELDAEIELEMAQGPGSARRVDADRPPLPQESPGARDAPNLVARKVSVSRMLSLPNDSYMFRPVVPASAPHPRPLQEVEMETYGAGTPLGSVASVHSPPAESCASLQIPLAVSSPARSGEPLHALSPRGTARSPSLSRLLCRQEAVHTDSLEGKIDSPRDTLDPAEPGEKTPVRPVTQGGSLQSPPRSPRPASVRTRKHTFGQRCVSSRPAAPGGEEAEASDPADEEVSHITSSACPWQPTAEPHGPEASPVAGGERDLRRLYSVDAQGFLDKPGRADEQWRPSAELGSGEPGEAKAWGPEAEPALGARRKKKMSPPCISVEPPAEDEGSARPSAAEGGSTTLRRRTPSCEATPHRDSLEPTEGSGAGGDPAAKGERWGQASCRAEHLTVPSFAFEPLDLGVPSGDPFLDGSHSVTPESRASSSGAIVPLEPPESEPPMPVGDPPEKRRGLYLTVPQCPLEKPGSPSATPAPGGGADDPV

SEQ ID NO: 3295 - protein, 160 aa, Homo sapiens
MVKNVLERPEDQRLIYSGKLLLDHQCLRDLLPKQEKRHVLHLVCNVKSPSKMPEINAKVAESTEEPAGSNRGQYPEDSSSDGLRQREVLRNLSSPGWENISRPEAAQQAFQGLGPGFSGYTPYGWLQLSWFQQIYARQYYMQYLAATAASGAFVPPPSAQ

SEQ ID NO: 3296 - protein, 114 aa, Homo sapiens
MELCEFAFNMKKDEVCVNPYHYQRVETPVLPPVLVPRHTEIPAEFPPLDDYSHSIPENTNFPAGIEPQSNIPETPPPGYLSEDGETSDHQMNHSMDAGSPNLSPNPMSPAHNNL

SEQ ID NO: 3297 - protein, 507 aa, Homo sapiens; identical to SEQ ID NO: 3284

SEQ ID NO: 3298 - protein, 182 aa, Homo sapiens
SRYRSRSRSRSRSRGRSYCGRAYAIARGQRYYGFGRTVYPEEHSRWRDRSRTRSRSRTPFRLSEKDRMELLEIAKTNAAKALGTTNIDLPASLRTVPSAKETSRGIGVSSNGAKPELSEKVTEDGTRNPNEKPTQQRSIAFSSNNSVAKPIQKSAKAATEEASSRSPKIDQKKSPYGLWIPI

SEQ ID NO: 3299 - protein, 111 aa, Homo sapiens
MMASFQRSNSHDKVRRIVAEEGRTARNLIAWSVPLESKDDDGKPKCQTGGKSKRTIQGTHKTTKQSTAVDCKITSSTTGDKHFDKSPTKTRHPRKIDLRARYWAFLFDNLR

SEQ ID NO: 3300 - protein, 869 aa, Homo sapiens
MDFPSSLRPALFLTGPLGLSDVPDLSFMCSWRDALTLPEAQPQNSENGALHVTKDLLWEPATPGPLPMLPPLIDPWDPGLTARDLLFRGGCRYRKRPRVVLDVTEQISRFLLDHGDVAFAPLGKLMLENFKLEGAGSRTKKKTVVSVKKLLQDLGGHQPWGCPWAYLSNRQRRFSILGGPILGTSVASHLAELLHEELVLRWEQLLLDEACTGGALAWVPGRTPQFGQLVYPAGGAQDRLHFQEVVLTPGDNPQFLGKPGRIQLQGPVRQVVTCTVQGESKALIYTFLPHWLTCYLTPGPFHPSSALLAVRSDYHCAVWKFGKQWQPTLLQAMQVEKGATGISLSPHLPGELAICSRSGAVCLWSPEDGLRQIYRDPETLVFRDSSSWRWADFTAHPRVLTVGDRTGVKMLDTQGPPGCGLLLFRLGAEASCQKGERVLLTQYLGHSSPKCLPPTLHLVCTQFSLYLVDERLPLVPMLKWNHGLPSPLLLARLLPPPRPSCVQPLLLGGQGGQLQLLHLAGEGASVPRLAGPPQSLPSRIDSLPAFPLLEPKIQWRLQERLKAPTIGLAAVVPPLPSAPTPGLVLFQLSAAGDVFYQQLRPQVDSSLRRDAGPPGDTQPDCHAPTASWTSQDTAGCSQWLKALLKVPLAPPVWTAPTFTHRQMLGSTELRREEEEGQRLGVLRKAMARGQLLLQRDLGSLPAAEPPPAPESGLEDKLSERLGEAWAGRGAAWWERQQGRTSEPGRQTRRPKRRTQLSSSFSLSGHVDPSEDTSSPHSPEWPPADALPLPPTTPPSQELTPDACAQGVPSEQRQMLRDYMAKLPPQRDTPGCATTPPHSQASSVRATRSQQHTPVLSSSQPLRKKPRMGF

SEQ ID NO: 3301 - protein, 7555 aa, Homo sapiens
MPLLDSSYLPPTIFILTHVLGVAGVLYWKRHARGRADERDRVQKKTFTKWVNKHLMKVRKHINDLYEDLRDGHNLISLLEVLSGIKLEPAGLKTLRLVSMPSWCHTNNEEQAEEDDDDVPREKGRMRFHRLQNVQIALDFLKQRQVKLVNIRNDDITDGNPKLTLGLIWTIILHFQISDIYISGESGDMSAKEKLLLWTQKVTAGYTGIKCTNFSSCWSDGKMFNALIHRYRPDLVDMERVQIQSNRENLEQAFEVAERLGVTRLLDAEDVDVPSPDEKSVITYVSSIYDAFPKVPEGGEGISATEVDSRWQEYQSRVDSLIPWIKQHTILMSDKTFPQNPVELKALYNQYIHFKETEILAKEREKGRIEELYKLLEVWIEFGRIKLPQGYHPNDVEEEWGKLIIEMLEREKSLRPAVERLELLLQIANKIQNGALNCEEKLTLAKNTLQADAAHLESGQPVQCESDVIMYIQECEGLIRQLQVDLQILRDENYYQLEELAFRVMRLQDELVTLRLECTNLYRKGHFTSLELVPPSTLTTTHLKAEPLTKATHSSSTSWFRKPMTRAELVAISSSEDEGNLRFVYELLSWVEEMQMKLERAEWGNDLPSVELQLETQQHIHTSVEELGSSVKEARLYEGKMSQNFHTSYAETLGKLETQYCKLKETSSFRMRHLQSLHKFVSRATAELIWLNEKEEEELAYDWSDNNSNISAKRNYFSELTMELEEKQDVFRSLQDTAELLSLENHPAKQTVEAYSAAVQSQLQWMKQLCLCVEQHVKENTAYFQFFSDARELESFLRNLQDSIKRKYSCDHNTSLSRLEDLLQDSMDEKEQLIQSKSSVASLVGRSKTIVQLKPRSPDHVLKNTISVKAVCDYRQIEITICKNDECVLEDNSQRTKWKVISPTGNEAMVPSVCFLIPPPNKDAIEMASRVEQSYQKVMALWHQLHVNTKSLISWNYLRKDLDLVQTWNLEKLRSSAPGECHQIMKNLQAHYEDFLQDSRDSVLFSVADRLRLEEEVEACKARFQHLMKSMENEDKEETVAKMYISELKNIRLRLEEYEQRVVKRIQSLASSRTDRDAWQDNALRIAEQEHTQEDLQQLRSDLDAVSMKCDSFLHQSPSSSSVPTLRSELNLLVEKMDHVYGLSTVYLNKLKTVDVIVRSIQDAELLVKGYEIKLSQEEVVLADLSALEAHWSTLRHWLSDVKDKNSVFSVLDEEIAKAKVVAEQMSRLTPERNLDLERYQEKGSQLQERWHRVIAQLEIRQSELESIQEVLGDYRACHGTLIKWIEETTAQQEMMKPGQAEDSRVLSEQLSQQTALFAEIERNQTKLDQCQKFSQQYSTIVKDYELQLMTYKAFVESQQKSPGKRRRMLSSSDAITQEFMDLRTRYTALVTLTTQHVKYISDALRRLEEEEKVVEEEKQEHVEKVKELLGWVSTLARNTQGKATSSETKESTDIEKAILEQQVLSEELTTKKEQVSEAIKTSQIFLAKHGHKLSEKEKKQISEQLNALNKAYHDLCDGSANQLQQLQSQLAHQTEQKECRAVAGVIDLGTVEIFPIFKAMQKGLLDQDTGLVLLESQVIMSGLIAPETGENLSLEEGIARNLINPQMYQQLRELQDALALISRLTESRGPLSVVEAIEKRIISETVGLKILEAHLATGGFSLSPSENCINLEEAFHQGLISAWLHSVLESYLRTSKNLIDPNTAEKIGLLDLMQRCIVHQESGFKLLPVKQLAGGMVSLKSGRKVSIFRAVQEGLIDRQVTVRLLEAQLFAGGIVDPRTGHRLTVEEAVRHNLIDQDMACAILIRQLQTGGIIDTVTGQRLTIDEAVSNDLVAAKIALVILESLWSFMGLLWPESGEILPITDALEQGIVSTELAHKILSNRQHIKALFLPATTEILSWKKAIESGILDRDLANNLKSICIPDVMPHMQLADSAEQNINPGAAVLPCSKSHPKATASQSENLLFQLMTHSYINVQNGQRLLLLDKELMETLTSRDEYQTSPPKVVEIGHQRQKTPEGLQESANVKISGTFSSGWTVRLPEFQFSSQNKEYPDREDCTTEKGKKTTVETEDSSVENPEQDLFVEQKERNPNIDALKVINKVKLEVQRQLIGTQREDQTAVSVRENASRGHLLTIPPAEAEGVPLVVDKDVFSVETPKKEHQPLRNTSFTCQNEQAHTLETEYIHDETGGSHIKPQSKKLQVQVKKTLGIKLELKSETDGNVHPLDKKEMLKKTFLAKDDHKESQEAQNIAGGSMMMSEKTDEEDSGREIFLSCSHPLELLEEATLNVLSAQLLDGGIFHEQTGQKLLLNEAISRGIVPSHTAVKLMEKLNMFQGFFDSQTCESLTTEEVINEGLMDEKLLHNVLMADKAISGVLDPRTQTLCSVKDAVTVGLLDKETATRILERQVVTGGIIDLKRGKKVSVTLASTLGLVDVADQPELINLEKASKGRDAEKTVRERLISLQMETTGLIDPDSKAPLTVVQSIDRGLLEREEAVRLLTKQVVDGGIIHHISGMRLSVDNAFRHGLIGEDLAEKLKRVENLNIHQIFNPETKENISLPKAIKLDLITSDLKREIQEVQAFTGNFVDLISGQRLTLAEAKKEGLLTNEAVLSPGMMHGIVDPENCRIVPYSELVKKCKIDIESGQRYLEVIPFSDIKDGVSDKVLTLSQAIQLGKVDFASTLKVLEAQANTGGIIDTATGKRLTLASALEEKLVDENMVRIIASHQVLNGGIVDIFSDQRVTLVEAIEKRLISPELANMIQIDSSEFSDHRAQIEKQEGIEVCALQNEFLGKDMLIACNQTAEMSCNKVEESERLFQVENQSAQEKVKVRVSDGEQAKKSREISLKEFGCKDQRKPRMSSDAKEFISIINPHNLKGKSLGQVSLTHPYSECDFKLKEVARNNMGNDTNEEQEKAVTKIEIISHMKQSTSCLDSEEIRENQGEVILEVQETYCETSGKLPSEQVLQQPMNARVKSKREKREVIVEESIRTCKPAFLSEEKLYQETAIRDEHDSHIKSQPREMTSSEKGKEADTEMGFSITFKIEESSSQVVPQGISVKHLDALTLFSSKQANEGKVNNLSLCLTLKPEENLSREIACGAQSEPFPCMTPRPEGLHYQESDGKAQVTGPSQISKTDKSFQGTTRQETNYQDSWVTSKTKETKHQISSSNECKEKSYQEVSFDPARGLKLEEITVSRPDSKEVRYLEFSDRKDLHHQGSKSDDKLCGTLKSEIATQELTGEKFLEMANPNVAGLEAGSIEDIVTQRGSRVLGSFLPEKLFKGVSQKENTGQQNAIISPTVLETSEEKTVSLTVCSAVKTEKTPQEKLRESPGSEQTPFMTAPEGKGNGGVNPEPFRATQNVFTRQLCLEHDEKLVSYLSLLRNIEMRTKQIQPLELNLAELQDLLCQAKVLERELKDLTTLVSQELECVNQIIISQPQEVPAQLLKALEKDAKNLQKSLSSVSDTWNSRLLHFQNAVEIEKTKVLNQHTQLEGRLQDLRAWVGNKNLILNSKGSNSEIDVDSLNLCLQQYEDLKQPMAERKAQLDALAFDIQFFISEHAQDLSPQQNRQMLRLLNELQRSFQDILEQTAAQVDALQGHLQQMEQEALVKTLQKQQNTCHQQLEDLCSWVGQAERALAGHQGRTTQQDLSALQKNQSDLKDLQDDIQNRATSFATVVKDIEGFMEENQTKLSPRELTALREKLHQAKEQYEALQEETRVAQKELEEAVTSALQQETEKSKAAKELAENKKKIDALLDWVTSVGSSGGQLLTNLPGMEQLSGASLEKGALDTTDGYMGVNQAPEKLDKQCEMMKARHQELLSQQQNFILATQSAQAFLDQHGHNLTPEEQQMLQQKLGELKEQYSTSLAQSEAELKQVQTLQDELQKFLQDHKEFESWLERSEKELENMHKGGSSPETLPSLLKRQGSFSEDVISHKGDLRFVTISGQKVLDMENSFKEGKEPSEIGNLVKDKLKDATERYTALHSKCTRLGSHLNMLLGQYHQFQNSADSLQAWMQACEANVEKLLSDTVASDPGVLQEQLATTKQLQEELAEHQVPVEKLQKVARDIMEIEGEPAPDHRHVQETTDSILSHFQSLSYSLAERSSLLQKAIAQSQSVQESLESLLQSIGEVEQNLEGKQVSSLSSGVIQEALATNMKLKQDIARQKSSLEATREMVTRFMETADSTTAAVLQGKLAEVSQRFEQLCLQQQEKESSLKKLLPQAEMFEHLSGKLQQFMENKSRMLASGNQPDQDITHFFQQIQELNLEMEDQQENLDTLEHLVTELSSCGFALDLCQHQDRVQNLRKDFTELQKTVKEREKDASSCQEQLDEFRKLVRTFQKWLKETEGSIPPTETSMSAKELEKQIEHLKSLLDDWASKGTLVEEINCKGTSLENLIMEITAPDSQGKTGSILPSVGSSVGSVNGYHTCKDLTEIQCDMSDVNLKYEKLGGVLHERQESLQAILNRMEEVHKEANSVLQWLESKEEVLKSMDAMSSPTKTETVKAQAESNKAFLAELEQNSPKIQKVKEALAGLLVTYPNSQEAENWKKIQEELNSRWERATEVTVARQRQLEESASHLACFQAAESQLRPWLMEKELMMGVLGPLSIDPNMLNAQKQQVQFMLKEFEARRQQHEQLNEAAQGILTGPGDVSLSTSQVQKELQSINQKWVELTDKLNSRSSQIDQAIVKSTQYQELLQDLSEKVRAVGQRLSVQSAISTQPEAVKQQLEETSEIRSDLEQLDHEVKEAQTLCDELSVLIGEQYLKDELKKRLETVALPLQGLEDLAADRINRLQAALASTQQFQQMFDELRTWLDDKQSQQAKNCPISAKLERLQSQLQENEEFQKSLNQHSGSYEVIVAEGESLLLSVPPGEEKRTLQNQLVELKNHWEELSKKTADRQSRLKDCMQKAQKYQWHVEDLVPWIEDCKAKMSELRVTLDPVQLESSLLRSKAMLNEVEKRRSLLEILNSAADILINSSEADEDGIRDEKAGINQNMDAVTEELQAKTGSLEEMTQRLREFQESFKNIEKKVEGAKHQLEIFDALGSQACSNKNLEKLRAQQEVLQALEPQVDYLRNFTQGLVEDAPDGSDASQLLHQAEVAQQEFLEVKQRVNSGCVMMENKLEGIGQFHCRVREMFSQLADLDDELDGMGAIGRDTDSLQSQIEDVRLFLNKIHVLKLDIEASEAECRHMLEEEGTLDLLGLKRELEALNKQCGKLTERGKARQEQLELTLGRVEDFYRKLKGLNDATTAAEEAEALQWVVGTEVEIINQQLADFKMFQKEQVDPLQMKLQQVNGLGQGLIQSAGKDCDVQGLEHDMEEINARWNTLNKKVAQRIAQLQEALLHCGKFQDALEPLLSWLADTEELIANQKPPSAEYKVVKAQIQEQKLLQRLLDDRKATVDMLQAEGGRIAQSAELADREKITGQLESLESRWTELLSKAAARQKQLEDILVLAKQFHETAEPISDFLSVTEKKLANSEPVGTQTAKIQQQIIRHKALEEDIENHATDVHQAVKIGQSLSSLTSPAEQGVLSEKIDSLQARYSEIQDRCCRKAALLDQALSNARLFGEDEVEVLNWLAEVEDKLSSVFVKDFKQDVLHRQHADHLALNEEIVNRKKNVDQAIKNGQALLKQTTGEEVLLIQEKLDGIKTRYADITVTSSKALRTLEQARQLATKFQSTYEELTGWLREVEEELATSGGQSPTGEQIPQFQQRQKELKKEVMEHRLVLDTVNEVSRALLELVPWRAREGLDKLVSDANEQYKLVSDTIGQRVDEIDAAIQRSQQYEQAADAELAWVAETKRKLMALGPIRLEQDQTTAQLQVQKAFSIDIIRHKDSMDELFSHRSEIFGTCGEEQKTVLQEKTESLIQQYEAISLLNSERYARLERAQVLVNQFWETYEELSPWIEETRALIAQLPSPAIDHEQLRQQQEEMRQLRESIAEHKPHIDKLLKIGPQLKELNPEEGEMVEEKYQKAENMYAQIKEEVRQRALALDEAVSQSTQFHDKIEPMLETLENLSSRLRMPPLIPAEVDKIRECISDNKSATVELEKLQPSFEALKRRGEELIGRSQGADKDLAAKEIQDKLDQMVFFWEDIKARAEEREIKFLDVLELAEKFWYDMAALLTTIKDTQDIVHDLESPGIDPSIIKQQVEAAETIKEETDGLHEELEFIRILGADLIFACGETEKPEVRKSIDEMNNAWENLNKTWKERLEKLEDAMQAAVQYQDTLQAMFDWLDNTVIKLCTMPPVGTDLNTVKDQLNEMKEFKVEVYQQQIEMEKLNHQGELMLKKATDETDRDIIREPLTELKHLWENLGEKIAHRQHKLEGALLALGQFQHALEELMSWLTHTEELLDAQRPISGDPKVIEVELAKHHVLKNDVLAHQATVETVNKAGNELLESSAGDDASSLRSRLEAMNQCWESVLQKTEEREQQLQSTLQQAQGFHSEIEDFLLELTRMESQLSASKPTGGLPETAREQLDTHMELYSQLKAKEETYNQLLDKGRLMLLSRDDSGSGSKTEQSVALLEQKWHVVSSKMEERKSKLEEALNLATEFQNSLQEFINWLTLAEQSLNIASPPSLILNTVLSQIEEHKVFANEVNAHRDQIIELDQTGNQLKFLSQKQDVVLIKNLLVSVQSRWEKVVQRSIERGRSLDDARKRAKQFHEAWKKLIDWLEDAESHLDSELEISNDPDKIKLQLSKHKEFQKTLGGKQPVYDTTIRTGRALKEKTLLPEDSQKLDNFLGEVRDKWDTVCGKSVERQHKLEEALLFSGQFMDALQALVDWLYKVEPQLAEDQPVHGDLDLVMNLMDAHKVFQKELGKRTGTVQVLKRSGRELIENSRDDTTWVKGQLQELSTRWDTVCKLSVSKQSRLEQALKQAEVFRDTVHMLLEWLSEAEQTLRFRGALPDDTEALQSLIDTHKEFMKKVEEKRVDVNSAVAMGEVILAVCHPDCITTIKHWITIIRARFEEVLTWAKQHQQRLETALSELVANAELLEELLAWIQWAETTLIQRDQEPIPQNIDRVKALIAEHQTFMEEMTRKQPDVDRVTKTYKRKNIEPTHAPFIEKSRSGGRKSLSQPTPPPMPILSQSEAKNPRINQLSARWQQVWLLALERQRKLNDALDRLEELKEFANFDFDVWRKKYMRWMNHKKSRVMDFFRRIDKDQDGKITRQEFIDGILASKFPTTKLEMTAVADIFDRDGDGYIDYYEFVAALHPNKDAYRPTTDADKIEDEVTRQVAQCKCAKRFQVEQIGENKYRFFLGNQFGDSQQLRLVRILRSTVMVRVGGGWMALDEFLVKNDPCRVHHPGSKIKRSDSSSSISSQSPIARGRTNIELREKFILPEGASQGMTPFRSRGRRSKPSSRAASPTRSSSSASQSNHSCTSMPSSPATPASGTKTSLQFSRCYDKPWLVNSKAGTPIRDSHSPDLQLPTPEVIPSSGSKLKRPTPTFHSSRTSLAGDTSNSSSPASTGAKTNRADPKKSASRPGSRAGSRAGSRASSRRGSDASDFDLLETQSACSDTSESSAAGGQGNSRRGLNKPSKIPTMSKKTTTASPRTPGPKR

SEQ ID NO: 3302 - protein, 1315 aa, Homo sapiens
MLSRPKPGESEVDLLHFQSQFLAAGAAPAVQLVKKGNRGGGDANSDRPPLQDHRDVVMLDNLPDLPPALVPSPPKRARPSPGHCLPEDEDPEERLRRHDQHITAVLTKIIERDTSSVAVNLPVPSGVAFPAVFLRSRDTQGKSATSGKRSIFAQEIAARRIAEAKGPSVGEVVPNVGPPEGAVTCETPTPRNQGCQLPGSSHSFQGPNLVTGKGLRDQEAEQEAQTIHEENIARLQAMAPEEILQEQQRLLAQLDPSLVAFLRSHSHTQEQTGETASEEQRPGGPSANVTKEEPLMSAFASEPRKRDKLEPEAPALALPVTPQKEWLHMDTVELEKLHWTQDLPPVRRQQTQERMQARFSLQGELLAPDVDLPTHLGLHHHGEEAERAGYSLQELFHLTRSQVSQQRALALHVLAQVISRAQAGEFGDRLAGSVLSLLLDAGFLFLLRFSLDDRVDGVIATAIRALRALLVAPGDEELLDSTFSWYHGALTFPLMPSQEDKEDEDEDEECPAGKAKRKSPEEESRPPPDLARHDVIKGLLATSLLPRLRYVLEVTYPGPAVVLDILAVLIRLARHSLESATRVLECPRLIETIVREFLPTSWSPVGAGPTPSLYKVPCATAMKLLRVLASAGRNIAARLLSSFDLRSRLCRIIAEAPQELALPPEEAEMLSTEALRLWAVAASYGQGGYLYRELYPVLMRALQVVPRELSTHPPQPLSMQRIASLLTLLTQLTLAAGSTPAETISDSAEASLSATPSLVTWTQVSGLQPLVEPCLRQTLKLLSRPEMWRAVGPVPVACLLFLGAYYQAWSQQPSSCPEDWLQDMQRLSEELLLPLLSQPTLGSLWDSLRHCSLLCNPLSCVPALEAPPSLVSLGCSGGCPRLSLAGSASPFPFLTALLSLLNTLAQIHKGLCGQLAAILAAPGLQNYFLQCVAPGAAPHLTPFSAWALRHEYHLQYLALALAQKAAALQPLPATHAALYHGMALALLSRLLPGSEYLTHELLLSCVFRLEFLPERTSGGPEAADFSDQLSLGSSRVPRCGQGTLLAQACQDLPSIRNCYLTHCSPARASLLASQALHRGELQRVPTLLLPMPTEPLLPTDWPFLPLIRLYHRASDTPSGLSPTDTMGTAMRVLQWVLVLESWRPQALWAVPPAARLARLMCVFLVDSELFRESPVQHLVAALLAQLCQPQVLPNLNLDCRLPGLTSFPDLYANFLDHFEAVSFGDHLFGALVLLPLQRRFSVTLRLALFGEHVGALRALSLPLTQVLSQPSRTCKGTLHWASGAVLSLEELWKTSASSSYLLGALRGLRESMKRA

SEQ ID NO: 3303 - protein, 747 aa, Homo sapiens
MMASFQRSNSHDKVRRIVAEEGRTARNLIAWSVPLESKDDDGKPKCQTGGKSKRTIQGTHKTTKQSTAVDCKITSSTTGDKHFDKSPTKTRHPRKIDLRARYWAFLFDNLRRAVDEIYVTCESDQSVVECKEVLMMLDNYVRDFKALIDWIQLQEKLEKTDAQSRPTSLAWEVKKMSPGRHVIPSPSTDRINVTSNARRSLNFGGSTGTVPAPRLAPTGVSWADKVKAHHTGSTASSEITPAQSCPPMTVQKASRKNERKDAEGWETVQRGRPIRSRSTAVMPKVSLATEATRSKDDSDKENVCLLPDESIQKGQFVGDGTSNTIESHPKDSLHSCDHPLAEKTQFTVSTLDDVKNSGSIRDNYVRTSEISAVHIDTECVSVMLQAGTPPLQVNEEKFPAEKARIENEMDPSDISNVSAANLSMAEVLAKKEELADRLEKANEEAIASAIAEEEQLTREIEAEENNDINIETDNDSDFSASMGSGSVSFCGMSMDWNDVLADYEARESWRQNTSWGDIVEEEPARPPGHGIHMHEKLSSPSRKRTIAESKKKHEEKQMKAQQLREKLREEKTLKLQKLLEREKDVRKWKEELLDQRRRMMEEKLLHAEFKREVQLQAIVKKAQEEEAKVNEIAFINTLEAQNKRHDVLSKLKEYEQRLNELQEERQRRQEEKQARDEAVQERKRALEAERQARVEELLMKRKEQEARIEQQRQEKEKAREDAARERARDREERLAALTAAQQEAMEE

SEQ ID NO: 3304 - protein, 180 aa, Homo sapiens
MLSRPKPGESEVDLLHFQSQFLAAGAAPAVQLVKKGNRGGGDANSDRPPLQDHRDVVMLDNLPDLPPALVPSPPKRARPSPGHCLPEDEDPEERLRRHDQHITAVLTKIIERDTSSVAVNLPVPSGVAFPAVFLRSRDTQGKSATSGKRSIFAQEIAARRIAEAKGPSVGEVVPNVGPPE

SEQ ID NO: 3305 - protein, 2084 aa, Homo sapiens
MDALESLLDEVALEGLDGLCLPALWSRLETRVPPFPLPLEPCTQEFLWRALATHPGISFYEEPRERPDLQLQDRYEEIDLETGILESRRDPVALEDVYPIHMILENKDGIQGSCRYFKERKNITNDIRTKSLQPRCTMVEAFDRWGKKLIIVASQAMRYRALIGQEGDPDLKLPDFSYCILERLGRSRWQGELQRDLHTTAFKVDAGKLHYHRKILNKNGLITMQSHVIRLPTGAQQHSILLLLNRFHVDRRSKYDILMEKLSVMLSTRTNHIETLGKLREELGLCERTFKRLYQYMLNAGLAKVVSLRLQEIHPECGPCKTKKGTDVMVRCLKLLKEFKRNDHDDDEDEEVISKTVPPVDIVFERDMLTQTYDLIERRGTKGISQAEIRVAMNVGKLEARMLCRLLQRFKVVKGFMEDEGRQRTTKYISCVFAEESDLSRQYQREKARSELLTTVSLASMQEESLLPEGEDTFLSESDSEEERSSSKRRGRGSQKDTRASANLRPKTQPHHSTPTKGGWKVVNLHPLKKQPPSFPGAAEERACQSLASRDSLLDTSSVSEPNVSFVSHCADSNSGDIAVIEEVRMENPKESSSSLKTGRHSSGQDKPHETYRLLKRRNLIIEAVTNLRLIESLFTIQKMIMDQEKQEGVSTKCCKKSIVRLVRNLSEEGLLRLYRTTVIQDGIKKKVDLVVHPSMDQNDPLVRSAIEQVRFRISNSSTANRVKTSQPPVPQGEAEEDSQGKEGPSGSGDSQLSASSRSESGRMKKSDNKMGITPLRNYHPIVVPGLGRSLGFLPKMPRLRVVHMFLWYLIYGHPASNTVEKPSFISERRTIKQESGRAGVRPSSSGSAWEACSEAPSKGSQDGVTWEAEVELATETVYVDDASWMRYIPPIPVHRDFGFGWALVSDILLCLPLSIFIQIVQVSYKVDNLEEFLNDPLKKHTLIRFLPRPIRQQLLYKRRYIFSVVENLQRLCYMGLLQFGPTEKFQDKDQVFIFLKKNAVIVDTTICDPHYNLARSSRPFERRLYVLNSMQDVENYWFDLQCVCLNTPLGVVRCPRVRKNSSTDQGSDEEGSLQKEQESAMDKHNLERKCAMLEYTTGSREVVDEGLIPGDGLGAAGLDSSFYGHLKRNWIWTSYIINQAKKENTAAENGLTVRLQTFLSKRPMPLSARGNSRLNIWGEARVGSELCAGWEEQFEVDREPSLDRNRRVRGGKSQKRKRLKKDPGKKIKRKKKGEFPGEKSKRLRYHDEADQSALQRMTRLRVTWSMQEDGLLVLCRIASNVLNTKVKGPFVTWQVVRDILHATFEESLDKTSHSVGRRARYIVKNPQAYLNYKVCLAEVYQDKALVGDFMNRRGDYDDPKVCANEFKEFVEKLKEKFSSALRNSNLEIPDTLQELFARYRVLAIGDEKDQTRKEDELNSVDDIHFLVLQNLIQSTLALSDSQMKSYQSFQTFRLYREYKDHVLVKAFMECQKRSLVNRRRVNHTLGPKKNRALPFVPMSYQLSQTYYRIFTWRFPSTICTESFQFLDRMRAAGKLDQPDRFSFKDQDNNEPTNDMVAFSLDGPGGNCVAVLTLFSLGLISVDVRIPEQIIVVDSSMVENEVIKSLGKDGSLEDDEDEEDDLDEGVGGKRRSMEVKPAQASHTNYLLMRGYYSPGIVSTRNLNPNDSIVVNSCQMKFQLRCTPVPARLRPAAAPLEELTMGTSCLPDTFTKLINPQENTCSLEEFVLQLELSGYSPEDLTAALEILEAIIATGCFGIDKEELRRRFSALEKAGGGRTRTFADCIQALLEQHQVLEVGGNTARLVAMGSAWPWLLHSVRLKDREDADIQREDPQARPLEGSSSEDSPPEGQAPPSHSPRGTKRRASWASENGETDAEGTQMTPAKRPALQDSNLAPSLGPGAEDGAEAQAPSPPPALEDTAAAGAAQEDQEGVGFTESFGAANISQAARERDCESVCFIGRPWRVVDGHLNLPVCKGMMEAMLYHIMTRPGIPESSLLRHYQGVLQPVAVLELLQGLESLGCIRKRWLRKPRPVSLFSTPVVEEVEVPSSLDESPMAFYEPTLDCTLRLGRVFPHEVNWNKWIHL

SEQ ID NO: 3306 - protein, 959 aa, Homo sapiens
TGDEFLLLFTMASNHPAFSFHQKQVLRQELTQIQSSLNGGGGHGGKGAPGPGGALPTCPACHKITPRTEAPVSSVSNSLENALHTSAHSTEESLPKRPLGKHSKVSVEKIDLKGLSHTKNDRNVECSFEVLWSDSSITSVTKSSSEVTEFISKLCQLYPEENLEKLIPCLAGPDAFYVERNHVDLDSGLRYLASLPSHVLKNDHVRRFLSTSSPPQQLQSPSPGNPSLSKVGTVMGVSGRPVCGVAGIPSSQSGAQHHGQHPAGSAAPLPHCSHAGSAGSALAYRTQMDTSPAILMPSSLQTPQTQEQNGILDWLRKLRLHKYYPVFKQLSMEKFLSLTEEDLNKFESLTMGAKKKLKTQLELEKEKSERRCLNPSAPPLVTSSGVARVPPTSHVGPVQSGRGSHAAELRVEVEQPHHQLPREGSSSEYSSSSSSPMGVQAREESSDSAEENDRRVEIHLESSDKEKPVMLLNHFTSSSARPTAQVLPVQNEASSNPSGHHPLPPQMLSAASHITPIRMLNSVHKPERGSADMKLLSSSVHSLLSLEERNKGSGPRSSMKVDKSFGSAMMDVLPASAPHQPVQVLSGLSESSSMSPTVSFGPRTKVVHASTLDRVLKTAQQPALVVETSTAATGTPSTVLHAARPPIKLLLSSSVPADSAISGQTSCPNNVQISVPPAIINPRTALYTANTKVAFSAMSSMPVGPLQGGFCANSNTASPSSHPSTSFANMATLPSCPAPSSSPALSSVPESSFYSSSGGGGSTGNIPASNPNHHHHHHHQQPPAPPQPAPPPPGCIVCTSCGCSGSCGSSGLTVSYANYFQHPFSGPSVFTFPFLPFSPMCSSGYVSAQQYGGGSTFPVVHAPYSSSGTPDPVLSGQSTFAVPPMQNFMAGTAGVYQTQGLVGSSNGSSHKKSGNLSCYNCGATGHRAQDCKQPSMDFNRPGTFRLKYAPPAESLDSTD

SEQ ID NO: 3307 - protein, 198 aa, Homo sapiens
MPLFGWMKWPKNDSYKPTHYPGSDIVTKTLLRELKWHLKERERLIQEIENEQKVKKTGVDYNWLRNYQNPHTTIPVTEQRQLEVLCSQVQPCQTGTILSRFREVLAENDVLPWEIVYIFKQVLKDFLSSSDRGSEQEDLEDSGSMDCSAPSVIQGDSSKRADKDEIPTISSYVDKNTKDRFPVFSHRIWNLPYYHPSS

SEQ ID NO: 3308 - protein, 167 aa, Homo sapiens
MDRGRPAGSPLSASAEPAPLAAAIRDSRPGRTGPGPAGPGGGSRSGSGRPAAANAARERSRVQTLRHAFLELQRTLPSVPPDTKLSKLDVLLLATTYIAHLTRSLQDDAEAPADAGLGALRGDGYLHPVKKWPMRSRLYIGATGQFLKHSVSGEKTNHDNTPTDSQP

SEQ ID NO: 3309 - protein, 128 aa, Homo sapiens
MLSRPKPGESEVDLLHFQSQFLAAGAAPAVQLVKKGNRGGGDANSDRPPLQDHRDVVMLDNLPDLPPALVPSPPKRARPSPGHCLPEDEDPEERLRRHDQHITAVLTKIIERDTSSVAVNLPVPSGVA

SEQ ID NO: 3310 - protein, 177 aa, Homo sapiens
NTDRPDASAVYLHDFQRFLIHEQQEHWAQDLNKVRERMTKFIDDTMRETAEPFLFVDEFLTYLFSRENSIWDEKYDAVDMQDMNNPLSHYWISSSHNTYLTGDQLRSESSPEAYIRCLRMGCRCIELDCWDGPDGKPVIYHGWTRTTKIKFDDVVQAIKDHAFVTSRCPLSWVEVLL

SEQ ID NO: 3311 - protein, 182 aa, Homo sapiens
SAGPLETSSGPPVLDVRTTTALEMPDRENTFVVKVEGPSEYIMETVDAQHVKAWVSDIQECLSPGPCPATSPRPMTLPLAPGTSFLTRENTDSLELSCLNHSESLPSQDLLLGPSESNDRLSQGAYGGLSDRPSASISPSSASIAASHFDSMELLPPELPPRIPIEEGPPTGTVHPLSAPYP

SEQ ID NO: 3312 - protein, 376 aa, Homo sapiens
MDSPGYNCFVDKDKMDAAIQDLGPKELSCTELQELKQLARQGYWAQSHALRGKVYQRLIRDIPCRTVTPDASVYSDIVGKIVGKHSSSCLPLPEFVDNTQVPSYCLNARGEGAVRKILLCLANQFPDISFCPALPAVVALLLHYSIDEAECFEKACRILACNDPGRRLIDQSFLAFESSCMTFGDLVNKYCQAAHKLMVAVSEDVLQVYADWQRWLFGELPLCYFARVFDVFLVEGYKVLYRVALAILKFFHKVRAGQPLESDSVKQDIRTFVRDIAKTVSPEKLLEKAFAIRLFSRKEIQLLQMANEKALKQKGITVKQKSPGRCLWHSQERYRHCGHVCHAAGADHEVHHPSGHGWHHRHLRPGGGSPHRQLPE

SEQ ID NO: 3313 - protein, 430 aa, Homo sapiens
MMSEGKPPDKKRPRRSLSISKNKKKASNSIISCFNNAPPAKLACPVCSKMVPRYDLNRHLDEMCANNDFVQVDPGQVGLINSNVSMVDLTSVTLEDVTPKKSPPPKTNLTPGQSDSAKREVKQKISPYFKSNDVVCKNQDELRNRSVKVICLGSLASKLSRKYVKAKKSIDKDEEFAGSSPQSSKSTVVKSLIDNSSEIEDEDQILENSSQKENVFKCDSLKEECIPEHMVRGSKIMEAESQKATRECEKSALTPGFSDNAIMLFSPDFTLRNTLKSTSEDSLVKQECIKEVVEKREACHCEEVKMTVASEAKIQLSDSEAKSHSSADDASAWSNIQEAPLQDDSCLNNDIPHSIPLEQGSSCNGPGQTTGHPYYLRSFLVVLKTVLENEDDMLLFDEQEKGIVTKFYQLSDLWTVPFKDRVWRKWKLSS

SEQ ID NO: 3314 - protein, 75 aa, Homo sapiens
MMASFQRSNSHDKVRRIVAEEGRTARNLIAWSVPLESKDDDGKPKCQTGGKSKRTIQGTHKTTKQLFEESPYFFP

SEQ ID NO: 3315 - protein, 530 aa, Homo sapiens
MPAKGRYFLNEGEEGPDQDALYEKYQLTSQHGPLLLTLLLVAATACVALIIIAFSQGDPSRHQAILGMAFLVLAVFAALSVLMYVECLLRRWLRALALLTWACLVALGYVLVFDAWTKAACAWEQVPFFLFIVFVVYTLLPFSMRGAVAVGAVSTASHLLVLGSLMGGFTTPSVRVGLQLLANAVIFLCGNLTGAFHKHQMQDASRDLFTYTVKCIQIRRKLRIEKRQQENLLLSVLPAHISMGMKLAIIERLKEHGDRRCMPDNNFHSLYVKRHQNVSILYADIVGFTQLASDCSPKELVVVLNELFGKFDQIAKANECMRIKILGDCYYCVSGLPVSLPTHARNCVKMGLDMCQAIKQVREATGVDINMRVGIHSGNVLCGVIGLRKWQYDVWSHDVSLANRMEAAGVPGRVHITEATLKHLDKAYEVEDGHGQQRDPYLKEMNIRTYLVIDPRSQQPPPPSQHLPRPKGDAALKMRASVRMTRYLESWGAARPFAHLNHRESVSSERSPAPPPDPRQKHVPQGAVGG

SEQ ID NO: 3316 - protein, 154 aa, Homo sapiens
MMASFQRSNSHDKVRRIVAEEGRTARNLIAWSVPLESKDDDGKPKCQTGGKSKRTIQGTHKTTKQEVLMMLDNYVRDFKALIDWIQLQEKLEKTDAQSRPTSLAWEVKKMSPGRHVIPSPSTDRINVTSNARRSLNFGGSTGTVPAPRLAPTGV

SEQ ID NO: 3317 - protein, 306 aa, Homo sapiens
SGRGARSGEWGLAAAGAWETMHHCKRYRSPEPDPYLSYRWKRRRSYSREHEGRLRYPSRREPPPRRSRSRSKDPADQRPHPPFGSHDRLPYQRRYRERRDSDTYRCEERSPSFGEDYYGPSRSRHRRRSRERGPYRTRKHAHHCHKRRTRSCSSASSRSQQSSKRSSRSVEDDKEGHLVCRIGDWLQERYEIVGNLGEGTFGKVVECLDHARGKSQVALKIIRNVGKYREAARLEINVLKKIKEKDKENKFLCVLMSDWFNFHGHMCIAFELLGKNTFEFLKENNFQPYPLPHVRHMAYQLCHALR

SEQ ID NO: 3318 - protein, 133 aa, Homo sapiens
MTVLEQDTQGLDGWWLCSLHGRQGIVPGNRLKILVGMYDKKPAGPGPGPPATPAQPQPGLHAPAPPASQYTPMLPNTYQPQPDSVYLVPTPSKAQQGLYQVPGPSPQFQSPPAKQTSTFSKQTPHHPFPSPAT

SEQ ID NO: 3319 - protein, 7592 aa, Homo sapiens
MSSSDEETLSERSCRSERSCRSERSYRSERSGSLSPCPPGDTLPWNLPLHEQKKRKSQDSVLDPAERAVVRVADERDRVQKKTFTKWVNKHLMKVRKHINDLYEDLRDGHNLISLLEVLSGIKLEPAGLKTLRLVSMPSWCHTNNEEQAEEDDDDVPREKGRMRFHRLQNVQIALDFLKQRQVKLVNIRNDDITDGNPKLTLGLIWTIILHFQISDIYISGESGDMSAKEKLLLWTQKVTAGYTGIKCTNFSSCWSDGKMFNALIHRYRPDLVDMERVQIQSNRENLEQAFEVAERLGVTRLLDAEDVDVPSPDEKSVITYVSSIYDAFPKVPEGGEGISATEVDSRWQEYQSRVDSLIPWIKQHTILMSDKTFPQNPVELKALYNQYIHFKETEILAKEREKGRIEELYKLLEVWIEFGRIKLPQGYHPNDVEEEWGKLIIEMLEREKSLRPAVERLELLLQIANKIQNGALNCEEKLTLAKNTLQADAAHLESGQPVQCESDVIMYIQECEGLIRQLQVDLQILRDENYYQLEELAFRVMRLQDELVTLRLECTNLYRKGHFTSLELVPPSTLTTTHLKAEPLTKATHSSSTSWFRKPMTRAELVAISSSEDEGNLRFVYELLSWVEEMQMKLERAEWGNDLPSVELQLETQQHIHTSVEELGSSVKEARLYEGKMSQNFHTSYAETLGKLETQYCKLKETSSFRMRHLQSLHKFVSRATAELIWLNEKEEEELAYDWSDNNSNISAKRNYFSELTMELEEKQDVFRSLQDTAELLSLENHPAKQTVEAYSAAVQSQLQWMKQLCLCVEQHVKENTAYFQFFSDARELESFLRNLQDSIKRKYSCDHNTSLSRLEDLLQDSMDEKEQLIQSKSSVASLVGRSKTIVQLKPRSPDHVLKNTISVKAVCDYRQIEITICKNDECVLEDNSQRTKWKVISPTGNEAMVPSVCFLIPPPNKDAIEMASRVEQSYQKVMALWHQLHVNTKSLISWNYLRKDLDLVQTWNLEKLRSSAPGECHQIMKNLQAHYEDFLQDSRDSVLFSVADRLRLEEEVEACKARFQHLMKSMENEDKEETVAKMYISELKNIRLRLEEYEQRVVKRIQSLASSRTDRDAWQDNALRIAEQEHTQEDLQQLRSDLDAVSMKCDSFLHQSPSSSSVPTLRSELNLLVEKMDHVYGLSTVYLNKLKTVDVIVRSIQDAELLVKGYEIKLSQEEVVLADLSALEAHWSTLRHWLSDVKDKNSVFSVLDEEIAKAKVVAEQMSRLTPERNLDLERYQEKGSQLQERWHRVIAQLEIRQSELESIQEVLGDYRACHGTLIKWIEETTAQQEMMKPGQAEDSRVLSEQLSQQTALFAEIERNQTKLDQCQKFSQQYSTIVKDYELQLMTYKAFVESQQKSPGKRRRMLSSSDAITQEFMDLRTRYTALVTLTTQHVKYISDALRRLEEEEKVVEEEKQEHVEKVKELLGWVSTLARNTQGKATSSETKESTDIEKAILEQQVLSEELTTKKEQVSEAIKTSQIFLAKHGHKLSEKEKKQISEQLNALNKAYHDLCDGSANQLQQLQSQLAHQTEQKECRAVAGVIDLGTVEIFPIFKAMQKGLLDQDTGLVLLESQVIMSGLIAPETGENLSLEEGIARNLINPQMYQQLRELQDALALISRLTESRGPLSVVEAIEKRIISETVGLKILEAHLATGGFSLSPSENCINLEEAFHQGLISAWLHSVLESYLRTSKNLIDPNTAEKIGLLDLMQRCIVHQESGFKLLPVKQLAGGMVSLKSGRKVSIFRAVQEGLIDRQVTVRLLEAQLFAGGIVDPRTGHRLTVEEAVRHNLIDQDMACAILIRQLQTGGIIDTVTGQRLTIDEAVSNDLVAAKIALVILESLWSFMGLLWPESGEILPITDALEQGIVSTELAHKILSNRQHIKALFLPATTEILSWKKAIESGILDRDLANNLKSICIPDVMPHMQLADSAEQNINPGAAVLPCSKSHPKATASQSENLLFQLMTHSYINVQNGQRLLLLDKELMETLTSRDEYQTSPPKVVEIGHQRQKTPEGLQESANVKISGTFSSGWTVRLPEFQFSSQNKEYPDREDCTTEKGKKTTVETEDSSVENPEQDLFVEQKERNPNIDALKVINKVKLEVQRQLIGTQREDQTAVSVRENASRGHLLTIPPAEAEGVPLVVDKDVFSVETPKKEHQPLRNTSFTCQNEQAHTLETEYIHDETGGSHIKPQSKKLQVQVKKTLGIKLELKSETDGNVHPLDKKEMLKKTFLAKDDHKESQEAQNIAGGSMMMSEKTDEEDSGREIFLSCSHPLELLEEATLNVLSAQLLDGGIFHEQTGQKLLLNEAISRGIVPSHTAVKLMEKLNMFQGFFDSQTCESLTTEEVINEGLMDEKLLHNVLMADKAISGVLDPRTQTLCSVKDAVTVGLLDKETATRILERQVVTGGIIDLKRGKKVSVTLASTLGLVDVADQPELINLEKASKGRDAEKTVRERLISLQMETTGLIDPDSKAPLTVVQSIDRGLLEREEAVRLLTKQVVDGGIIHHISGMRLSVDNAFRHGLIGEDLAEKLKRVENLNIHQIFNPETKENISLPKAIKLDLITSDLKREIQEVQAFTGNFVDLISGQRLTLAEAKKEGLLTNEAVLSPGMMHGIVDPENCRIVPYSELVKKCKIDIESGQRYLEVIPFSDIKDGVSDKVLTLSQAIQLGKVDFASTLKVLEAQANTGGIIDTATGKRLTLASALEEKLVDENMVRIIASHQVLNGGIVDIFSDQRVTLVEAIEKRLISPELANMIQIDSSEFSDHRAQIEKQEGIEVCALQNEFLGKDMLIACNQTAEMSCNKVEESERLFQVENQSAQEKVKVRVSDGEQAKKSREISLKEFGCKDQRKPRMSSDAKEFISIINPHNLKGKSLGQVSLTHPYSECDFKLKEVARNNMGNDTNEEQEKAVTKIEIISHMKQSTSCLDSEEIRENQGEVILEVQETYCETSGKLPSEQVLQQPMNARVKSKREKREVIVEESIRTCKPAFLSEEKLYQETAIRDEHDSHIKSQPREMTSSEKGKEADTEMGFSITFKIEESSSQVVPQGISVKHLDALTLFSSKQANEGKVNNLSLCLTLKPEENLSREIACGAQSEPFPCMTPRPEGLHYQESDGKAQVTGPSQISKTDKSFQGTTRQETNYQDSWVTSKTKETKHQISSSNECKEKSYQEVSFDPARGLKLEEITVSRPDSKEVRYLEFSDRKDLHHQGSKSDDKLCGTLKSEIATQELTGEKFLEMANPNVAGLEAGSIEDIVTQRGSRVLGSFLPEKLFKGVSQKENTGQQNAIISPTVLETSEEKTVSLTVCSAVKTEKTPQEKLRESPGSEQTPFMTAPEGKGNGGVNPEPFRATQNVFTRQLCLEHDEKLVSYLSLLRNIEMRTKQIQPLELNLAELQDLLCQAKVLERELKDLTTLVSQELECVNQIIISQPQEVPAQLLKALEKDAKNLQKSLSSVSDTWNSRLLHFQNAVEIEKTKVLNQHTQLEGRLQDLRAWVGNKNLILNSKGSNSEIDVDSLNLCLQQYEDLKQPMAERKAQLDALAFDIQFFISEHAQDLSPQQNRQMLRLLNELQRSFQDILEQTAAQVDALQGHLQQMEQEALVKTLQKQQNTCHQQLEDLCSWVGQAERALAGHQGRTTQQDLSALQKNQSDLKDLQDDIQNRATSFATVVKDIEGFMEENQTKLSPRELTALREKLHQAKEQYEALQEETRVAQKELEEAVTSALQQETEKSKAAKELAENKKKIDALLDWVTSVGSSGGQLLTNLPGMEQLSGASLEKGALDTTDGYMGVNQAPEKLDKQCEMMKARHQELLSQQQNFILATQSAQAFLDQHGHNLTPEEQQMLQQKLGELKEQYSTSLAQSEAELKQVQTLQDELQKFLQDHKEFESWLERSEKELENMHKGGSSPETLPSLLKRQGSFSEDVISHKGDLRFVTISGQKVLDMENSFKEGKEPSEIGNLVKDKLKDATERYTALHSKCTRLGSHLNMLLGQYHQFQNSADSLQAWMQACEANVEKLLSDTVASDPGVLQEQLATTKQLQEELAEHQVPVEKLQKVARDIMEIEGEPAPDHRHVQETTDSILSHFQSLSYSLAERSSLLQKAIAQSQSVQESLESLLQSIGEVEQNLEGKQVSSLSSGVIQEALATNMKLKQDIARQKSSLEATREMVTRFMETADSTTAAVLQGKLAEVSQRFEQLCLQQQEKESSLKKLLPQAEMFEHLSGKLQQFMENKSRMLASGNQPDQDITHFFQQIQELNLEMEDQQENLDTLEHLVTELSSCGFALDLCQHQDRVQNLRKDFTELQKTVKEREKDASSCQEQLDEFRKLVRTFQKWLKETEGSIPPTETSMSAKELEKQIEHLKSLLDDWASKGTLVEEINCKGTSLENLIMEITAPDSQGKTGSILPSVGSSVGSVNGYHTCKDLTEIQCDMSDVNLKYEKLGGVLHERQESLQAILNRMEEVHKEANSVLQWLESKEEVLKSMDAMSSPTKTETVKAQAESNKAFLAELEQNSPKIQKVKEALAGLLVTYPNSQEAENWKKIQEELNSRWERATEVTVARQRQLEESASHLACFQAAESQLRPWLMEKELMMGVLGPLSIDPNMLNAQKQQVQFMLKEFEARRQQHEQLNEAAQGILTGPGDVSLSTSQVQKELQSINQKWVELTDKLNSRSSQIDQAIVKSTQYQELLQDLSEKVRAVGQRLSVQSAISTQPEAVKQQLEETSEIRSDLEQLDHEVKEAQTLCDELSVLIGEQYLKDELKKRLETVALPLQGLEDLAADRINRLQAALASTQQFQQMFDELRTWLDDKQSQQAKNCPISAKLERLQSQLQENEEFQKSLNQHSGSYEVIVAEGESLLLSVPPGEEKRTLQNQLVELKNHWEELSKKTADRQSRLKDCMQKAQKYQWHVEDLVPWIEDCKAKMSELRVTLDPVQLESSLLRSKAMLNEVEKRRSLLEILNSAADILINSSEADEDGIRDEKAGINQNMDAVTEELQAKTGSLEEMTQRLREFQESFKNIEKKVEGAKHQLEIFDALGSQACSNKNLEKLRAQQEVLQALEPQVDYLRNFTQGLVEDAPDGSDASQLLHQAEVAQQEFLEVKQRVNSGCVMMENKLEGIGQFHCRVREMFSQLADLDDELDGMGAIGRDTDSLQSQIEDVRLFLNKIHVLKLDIEASEAECRHMLEEEGTLDLLGLKRELEALNKQCGKLTERGKARQEQLELTLGRVEDFYRKLKGLNDATTAAEEAEALQWVVGTEVEIINQQLADFKMFQKEQVDPLQMKLQQVNGLGQGLIQSAGKDCDVQGLEHDMEEINARWNTLNKKVAQRIAQLQEALLHCGKFQDALEPLLSWLADTEELIANQKPPSAEYKVVKAQIQEQKLLQRLLDDRKATVDMLQAEGGRIAQSAELADREKITGQLESLESRWTELLSKAAARQKQLEDILVLAKQFHETAEPISDFLSVTEKKLANSEPVGTQTAKIQQQIIRHKALEEDIENHATDVHQAVKIGQSLSSLTSPAEQGVLSEKIDSLQARYSEIQDRCCRKAALLDQALSNARLFGEDEVEVLNWLAEVEDKLSSVFVKDFKQDVLHRQHADHLALNEEIVNRKKNVDQAIKNGQALLKQTTGEEVLLIQEKLDGIKTRYADITVTSSKALRTLEQARQLATKFQSTYEELTGWLREVEEELATSGGQSPTGEQIPQFQQRQKELKKEVMEHRLVLDTVNEVSRALLELVPWRAREGLDKLVSDANEQYKLVSDTIGQRVDEIDAAIQRSQQYEQAADAELAWVAETKRKLMALGPIRLEQDQTTAQLQVQKAFSIDIIRHKDSMDELFSHRSEIFGTCGEEQKTVLQEKTESLIQQYEAISLLNSERYARLERAQVLVNQFWETYEELSPWIEETRALIAQLPSPAIDHEQLRQQQEEMRQLRESIAEHKPHIDKLLKIGPQLKELNPEEGEMVEEKYQKAENMYAQIKEEVRQRALALDEAVSQSTQFHDKIEPMLETLENLSSRLRMPPLIPAEVDKIRECISDNKSATVELEKLQPSFEALKRRGEELIGRSQGADKDLAAKEIQDKLDQMVFFWEDIKARAEEREIKFLDVLELAEKFWYDMAALLTTIKDTQDIVHDLESPGIDPSIIKQQVEAAETIKEETDGLHEELEFIRILGADLIFACGETEKPEVRKSIDEMNNAWENLNKTWKERLEKLEDAMQAAVQYQDTLQAMFDWLDNTVIKLCTMPPVGTDLNTVKDQLNEMKEFKVEVYQQQIEMEKLNHQGELMLKKATDETDRDIIREPLTELKHLWENLGEKIAHRQHKLEGALLALGQFQHALEELMSWLTHTEELLDAQRPISGDPKVIEVELAKHHVLKNDVLAHQATVETVNKAGNELLESSAGDDASSLRSRLEAMNQCWESVLQKTEEREQQLQSTLQQAQGFHSEIEDFLLELTRMESQLSASKPTGGLPETAREQLDTHMELYSQLKAKEETYNQLLDKGRLMLLSRDDSGSGSKTEQSVALLEQKWHVVSSKMEERKSKLEEALNLATEFQNSLQEFINWLTLAEQSLNIASPPSLILNTVLSQIEEHKVFANEVNAHRDQIIELDQTGNQLKFLSQKQDVVLIKNLLVSVQSRWEKVVQRSIERGRSLDDARKRAKQFHEAWKKLIDWLEDAESHLDSELEISNDPDKIKLQLSKHKEFQKTLGGKQPVYDTTIRTGRALKEKTLLPEDSQKLDNFLGEVRDKWDTVCGKSVERQHKLEEALLFSGQFMDALQALVDWLYKVEPQLAEDQPVHGDLDLVMNLMDAHKVFQKELGKRTGTVQVLKRSGRELIENSRDDTTWVKGQLQELSTRWDTVCKLSVSKQSRLEQALKQAEVFRDTVHMLLEWLSEAEQTLRFRGALPDDTEALQSLIDTHKEFMKKVEEKRVDVNSAVAMGEVILAVCHPDCITTIKHWITIIRARFEEVLTWAKQHQQRLETALSELVANAELLEELLAWIQWAETTLIQRDQEPIPQNIDRVKALIAEHQTFMEEMTRKQPDVDRVTKTYKRKNIEPTHAPFIEKSRSGGRKSLSQPTPPPMPILSQSEAKNPRINQLSARWQQVWLLALERQRKLNDALDRLEELKEFANFDFDVWRKKYMRWMNHKKSRVMDFFRRIDKDQDGKITRQEFIDGILASKFPTTKLEMTAVADIFDRDGDGYIDYYEFVAALHPNKDAYRPTTDADKIEDEVTRQVAQCKCAKRFQVEQIGENKYRFFLGNQFGDSQQLRLVRILRSTVMVRVGGGWMALDEFLVKNDPCRVHHPGSKIKRSDSSSSISSQSPIARGRTNIELREKFILPEGASQGMTPFRSRGRRSKPSSRAASPTRSSSSASQSNHSCTSMPSSPATPASGTKTSLQFSRCYDKPWLVNSKAGTPIRDSHSPDLQLPTPEVIPSSGSKLKRPTPTFHSSRTSLAGDTSNSSSPASTGAKTNRADPKKSASRPGSRAGSRAGSRASSRRGSDASDFDLLETQSACSDTSESSAAGGQGNSRRGLNKPSKIPTMSKKTTTASPRTPGPKR

SEQ ID NO: 3320 - protein, 834 aa, Homo sapiens
MEPAPARSPRPQQDPARPQEPTMPPPETPSEGRQPSPSPSPTERAPASEEEFQFLRCQQCQAEAKCPKLLPCLHTLCSGCLEASGMQCPICQAPWPLGADTPALDNVFFESLQRRLSVYRQIVDAQAVCTRCKESADFWCFECEQLLCAKCFEAHQWFLKHEARPLAELRNQSVREFLDGTRKTNNIFCSNPNHRTPTLTSIYCRGCSKPLCCSCALLDSSHSELKCDISAEIQQRQEELDAMTQALQEQDSAFGAVHAQMHAAVGQLGRARAETEELIRERVRQVVAHVRAQERELLEAVDARYQRDYEEMASRLGRLDAVLQRIRTGSALVQRMKCYASDQEVLDMHGFLRQALCRLRQEEPQSLQAAVRTDGFDEFKVRLQDLSSCITQGKDAAVSKKASPEAASTPRDPIDVDLDVSNTTTAQKRKCSQTQCPRKVIKMESEEGKEARLARSSPEQPRPSTSKAVSPPHLDGPPSPRSPVIGSEVFLPNSNHVASGAGEAEERVVVISSSEDSDAENSSSRELDDSSSESSDLQLEGPSTLRVLDENLADPQAEDRPLVFFDLKIDNETQKISQLAAVNRESKFRVVIQPEAFFSIYSKAVSLEVGLQHFLSFLSSMRRPILACYKLWGPGLPNFFRALEDINRLWEFQEAISGFLAALPLIRERVPGASSFKLKNLAQTYLARNMSERSAMAAVLAMRDLCRLLEVSPGPQLAQHVYPFSSLQCFASLQPLVQAAVLPRAEARLLALHNVSFMELLSAHRRDRQGGLKKYSRYLSLQTTTLPPAQPAFNLQALGTYFEGLLEGPALARAEGVSTPLAGRGLAERASQQS

SEQ ID NO: 3321 - protein, 43 aa, Homo sapiens
MTHTLREVHRPGLKISKREEVEAVTIVETPPLVVVGVVGYVAT

SEQ ID NO: 3322 - protein, 1773 aa, Homo sapiens
MRRGNISPAFWFLWLLLFGLLGPSSENTTAFTKGSDTTTASITGSETTMASTMASTSALTTGSKITTDSTTGSETTSASTMASTAAFTTGSETNTASTTDSGTTIASTRTFTTGSDTTTGSTAGSETIVASTTVSGTTTTFTIASTTVPETTMASSTTSTAGSEKTMASSIISETTMASTTGSETATVSTTGSETTTTSTASSEATKVSTTGSETTTASTAGSETTTTSTSMAGSEATTTSTADSKVITASSMSSETTVAPAAGSNTTTASTTGSETTTILIKASETTTASTAGSETTTPSPTGSQTTIVSISGSEITTTSTAGSENTTVSSAGSGTTTASMAGSETTVSTAGSETTTVSITGTETTMVSAMGSETTTNSTTSSETTVTSTAGSETTTVSTVGSETTTAYTADSETTAASTTGSEMTTVFTAGSETITPSTAGSETTTVSTAGSETTTVSTTGSETTTASTAHSETTAASTMGSETTKVSTAGSETTVSTAGSETTAASTEDSETNTAFTEDSKTTTASTTGFETTAASTTGSEPTMASTMGSETTMASTIGPETTKVSTASSEVTTVFAAGSETIRASTVGSETTTVSTTGSETTTASIMGSETSTDSTTGSETTTASTEGSETTTASTEGSEATTVSTTGSETTTVSITDSETTTTCTEGSEMTAVSTTVFETTTASTEGSEITIASTSDSETTTASTEGSETTTVTTAGSETKTAYTTGSETTTASNTGLETTTVFTIGSDTTTASTEGSETTAVSATGSEMTTVSTEGSENTTVSTTGSETTTVSTTGLETTTTSTEGSEMTTVSTTGAETTTDSTEGSGTTAASTAGSETTTVSTADSENTTASTADSETTSASTTGSETTTASTTSSETTTASTEGSETTTVSTTDSETTMVSTTGSERTITSTEGSETTTVSATGSETTVSTEGSGTTTVSITGSETTKVSTTGSETTTTSTEGSEITTASITGSETTTASTEGSETTTASTEGSETTSASTTGSETTTASTTSSETTMASIMGSETTMASTIGSETTKVSTASSKMTTVFTENSETTIASTTASETTTVSTAGSETIPASTAGSETTTTTSTEGSETTTASTEGSETTTASTESSETTTATTIGSETTTASTEGSETTTTSTEGSETTTASTEGSEITTVSTTGSETTTASTEGSETTTASTEGSELTTVSTTGSETITVSAEGSETTTVTTMGSETTTASTAGSETTTVSTAGSETTTASIEGSETTTVSSTGSETTTVSTTGTETTITSTEGSETTTVTTAGSETTAVYTTGSETTTTSTEGSETTTVSTTGSETTTASTADLETTTVSTSGSGTTTASTAGSETTTVYITGSKTTTASTEGSEATTVSTTSSETTTASTTGSEMTTVFTTVSETTTVSTIGSEATTSSAAGSEATTTSTEGSETTTASTAGSETTTASTAGSETTTASTSGSETNTACTTGSETSTPSSAGSETNTAFIIGSESTIASTASLEPTATSLTGSETTTVSITASGATAASTTVSSTTFVLTKATDVSIQPITNTPMSGTRTTGTRLTASSSVTMAPGMDFTASAASHTVPGIVLNTSGLGTSTMGASSTTSAHGVRTTTGSTREPTSSTFQETGPVSMGTNTVSMSHTPTNVIKPSGYLQPWAIILISLAAVVAAVGLSVGLSFCLRNLFFPLRYCGIYYPHGHSHSLGLDLNLGLGSGTFHSLGNALVHGGELEMGHGGTHGFGYGVGHGLSHIHGDGYGVNHGGHYGHGGGH

SEQ ID NO: 3323 - protein, 231 aa, Homo sapiens
MAQRGLPPAHDPWEPKPDWAHTGSHSSEAGKKDVSGPLRELRPRLCHLRKGPQGYGFNLHSDKSRPGQYIRSVDPGSPAARSGLRAQDRLIEVNGQNVEGLRHAEVVASIKAREDEARLLVVDPETDEHFKRLRVTPTEEHVEGPLPSPVTNGTSPAQLNGGSACSSRSDLPGSDKDTEDGSAWKQDPFQESGLHLSPTAAEAKEKARAMRVNKRAPQMDWNRKREIFSNF

SEQ ID NO: 3324 - protein, 843 aa, Homo sapiens
MDFPSSLRPALFLTGPLGLSDVPDLSFMCSWRDALTLPEAQPQNSENGALHVTKDLLWEPATPGPLPMLPPLIDPWDPGLTARDLLFRGGCRYRKRPRVVLDVTEQISRFLLDHGDVAFAPLGKLMLENFKLEGAGSRTKKKTVVSVKKLLQDLGGHQPWGCPWAYLSNRQRRFSILGGPILGTSVASHLAELLHEELVLRWEQLLLDEACTGGALAWVPGRTPQFGQLVYPAGGAQDRLHFQEVVLTPGDNPQFLGKPGRIQLQGPVRQVVTCTVQGETLLAVRSDYHCAVWKFGKQWQPTLLQAMQVEKGATGISLSPHLPGELAICSRSGAVCLWSPEDGLRQIYRDPETLVFRDSSSWRWADFTAHPRVLTVGDRTGVKMLDTQGPPGCGLLLFRLGAEASCQKGERVLLTQYLGHSSPKCLPPTLHLVCTQFSLYLVDERLPLVPMLKWNHGLPSPLLLARLLPPPRPSCVQPLLLGGQGGQLQLLHLAGEGASVPRLAGPPQSLPSRIDSLPAFPLLEPKIQWRLQERLKAPTIGLAAVVPPLPSAPTPGLVLFQLSAAGDVFYQQLRPQVDSSLRRDAGPPGDTQPDCHAPTASWTSQDTAGCSQWLKALLKVPLAPPVWTAPTFTHRQMLGSTELRREEEEGQRLGVLRKAMARGQLLLQRDLGSLPAAEPPPAPESGLEDKLSERLGEAWAGRGAAWWERQQGRTSEPGRQTRRPKRRTQLSSSFSLSGHVDPSEDTSSPHSPEWPPADALPLPPTTPPSQELTPDACAQGVPSEQRQMLRDYMAKLPPQRDTPGCATTPPHSQASSVRATRSQQHTPVLSSSQPLRKKPRMGF

SEQ ID NO: 3325 - protein, 149 aa, Homo sapiens
EVSLAQDPKRQQRKLKGNKISISGTKQEIFQVELNLQNASSDHQGNDKTYHCKGLLPPPEKLTAEVLGIICIVLMATVLKTIVLIPCIGVLEQNNFSLNRRMQKARHCGHCPEEWITYSNSCYYIGKERRTWEERVCWPVLRRTLICFL

SEQ ID NO: 3326 - protein, 68 aa, Homo sapiens
MLRLRSGLRHLRATPNTRGSARLLCAEMPKKAGATTKGGKSREKVVKLLASTTPEEILEKLKKEAKKT

SEQ ID NO: 3327 - protein, 1128 aa, Homo sapiens
MLSRPKPGESEVDLLHFQSQFLAAGAAPAVQLVKKGNRGGGDANSDRPPLQDHRDVVMLDNLPDLPPALVPSPPKRARPSPGHCLPEDEDPEERLRRHDQHITAVLTKIIERDTSSVAVNLPVPSGVAFPAVFLRSRDTQGKSATSGKRSIFAQEIAARRIAEAKGPSVGEVVPNVGPPEGAVTCETPTPRNQGCQLPGSSHSFQGPNLVTGKGLRDQEAEQEAQTIHEENIARLQAMAPEEILQEQQRLLAQLDPSLVAFLRSHSHTQEQTGETASEEQRPGGPSANVTKEEPLMSAFASEPRKRDKLEPEAPALALPVTPQKEWLHMDTVELEKLHWTQDLPPVRRQQTQERMQARFSLQGELLAPDVDLPTHLGLHHHGEEAERAGYSLQELFHLTRSQVSQQRALALHVLAQVISRAQAGEFGDRLAGSVLSLLLDAGFLFLLRFSLDDRVDGVIATAIRALRALLVAPGDEELLDSTFSWYHGALTFPLMPSQEDKEDEDEDEECPAGKAKRKSPEEESRPPPDLARHDVIKGLLATSLLPRLRYVLEVTYPGPAVVLDILAVLIRLARHSLESATRVLECPRLIETIVREFLPTSWSPVGAGPTPSLYKVPCATAMKLLRVLASAGRNIAARLLSSFDLRSRLCRIIAEAPQELALPPEEAEMLSTEALRLWAVAASYGQGGYLYRELYPVLMRALQVVPRELSTHPPQPLSMQRIASLLTLLTQLTLAAGSTPAETISDSAEASLSATPSLVTWTQVSGLQPLVEPCLRQTLKLLSRPEMWRAVGPVPVACLLFLGAYYQAWSQQPSSCPEDWLQDMQRLSEELLLPLLSQPTLGSLWDSLRHCSLLCNPLSCVPALEAPPSLVSLGCSGGCPRLSLAGSASPFPFLTALLSLLNTLAQIHKGLCGQLAAILAAPGLQNYFLQCVAPGAAPHLTPFSAWALRHEYHLQYLALALAQKAAALQPLPATHAALYHGMALALLSRLLPGSEYLTHELLLSCVFRLEFLPCLCPWSVTQCLLKTTWPSFSSTSGPWLLVRSAHVGAPCSMLWLWLMSIASSSLRTHRAQMRSKLPAGVCCRKHGCWQMRVSGSTSCTISFPIPRSQRALSSILSCPLCVSTTSRD

SEQ ID NO: 3328 - protein, 606 aa, Homo sapiens
MTSKRKPCQTQLRRSISEQLRDSTARAWDLLWKNVRERRLAEIEAKEACDWLRAAGFPQYAQLYEDSQFPINIVAVKNDHDFLEKDLVEPLCRRLNTLNKCASMKLDVNFQRKKGDDSDEEDLCISNKWTFQRTSRRWSRVDDLYTLLPRGDRNGSPGGTGMRNTTSSESVLTDLSEPEVCSIHSESSGGSDSRSQPGQCCTDNPVMLDAPLVSSSLPQPPRDVLNHPFHPKNEKPTRARAKSFLKRMETLRGKGAHGRHKGSGRTGGLVISGPMLQQEPESFKAMQCIQIPNGDLQNSPPPACRKGLPCSGKSSGESSPSEHSSSGVSTPCLKERKCHEANKRGGMYLEDLDVLAGTALPDAGDQSRMHEFHSQENLVVHIPKDHKPGTFPKALSIESLSPTDSSNGVNWRTGSISLGREQVPGAREPRLMASCHRASRVSIYDNVPGSHLYASTGDLLDLEKDDLFPHLDDILQHVNGLQEVVDDWSKDVLPELQTHDTLVGEPGLSTFPSPNQITLDFEGNSVSEGRTTPSDVERDVTSLNESEPPGVRDRRDSGVGASLTRPNRRLRWNSFQLSHQPRPAPASPHISSQTASQLSLLQRFSL

SEQ ID NO: 3329 - protein, 428 aa, Homo sapiens
MMLLGQVKYGLHNIQISHLSIASSQVELVEAKSIDVSIQNVSVVFKGTLKYGYTTAWWLGIDQSIDFEIDSAIDLQINTQLTCDSGRVRTDAPDCYLSFHKLLLHLQGEREPGWIKQLFTNFISFTLKLVLKGQICKEINVISNIMADFVQTRAASILSDGDIGVDISLTGDPVITASYLESHHKGHFIYKNVSEDLPLPTFSPTLLGDSRMLYFWFSERVFHSLAKVAFQDGRLMLSLMGDEFKAVLETWGFNTNQEIFQEVVGGFPSQAQVTVHCLKMPKISCQNKGVVVNSSVMVKFLFPRPDQQHSVAYTFEEDIVTTVQASYSKKKLFLSLLDFQITPKTVSNLTESSSESVQSFLQSMITAVGIPEVMSRLEVVFTALMNSKGVSLFDIINPEIITRDGFLLLQMDFGFPEHLLVDFLQSLS

SEQ ID NO: 3330 - protein, 1682 aa, Homo sapiens
MASWTSPWWVLIGMVFMHSPLPQTTAEKSPGAYFLPEFALSPQGSFLEDTTGEQFLTYRYDDQTSRNTRSDEDKDGNWDAWGDWSDCSRTCGGGASYSLRRCLTGRNCEGQNIRYKTCSNHDCPPDAEDFRAQQCSAYNDVQYQGHYYEWLPRYNDPAAPCALKCHAQGQNLVVELAPKVLDGTRCNTDSLDMCISGICQAVGCDRQLGSNAKEDNCGVCAGDGSTCRLVRGQSKSHVSPEKREENVIAVPLGSRSVRITVKGPAHLFIESKTLQGSKGEHSFNSPGVFLVENTTVEFQRGSERQTFKIPGPLMADFIFKTRYTAAKDSVVQFFFYQPISHQWRQTDFFPCTVTCGGGYQLNSAECVDIRLKRVVPDHYCHYYPENVKPKPKLKECSMDPCPSSDGFKEIMPYDHFQPLPRWEHNPWTACSVSCGGGIQRRSFVCVEESMHGEILQVEEWKCMYAPKPKVMQTCNLFDCPKWIAMEWSQCTVTCGRGLRYRVVLCINHRGEHVGGCNPQLKLHIKEECVIPIPCYKPKEKSPVEAKLPWLKQAQELEETRIATEEPTFIPEPWSACSTTCGPGVQVREVKCRVLLTFTQTETELPEEECEGPKLPTERPCLLEACDESPASRELDIPLPEDSETTYDWEYAGFTPCTATCVGGHQEAIAVCLHIQTQQTVNDSLCDMVHRPPAMSQACNTEPCPPRWHVGSWGPCSATCGVGIQTRDVYCLHPGETPAPPEECRDEKPHALQACNQFDCPPGWHIEEWQQCSRTCGGGTQNRRVTCRQLLTDGSFLNLSDELCQGPKASSHKSCARTDCPPHLAVGDWSKCSVSCGVGIQRRKQVCQRLAAKGRRIPLSEMMCRDLPGLPLVRSCQMPECSKIKSEMKTKLGEQGPQILSVQRVYIQTREEKRINLTIGSRAYLLPNTSVIIKCPVRRFQKSLIQWEKDGRCLQNSKRLGITKSGSLKIHGLAAPDIGVYRCIAGSAQETVVLKLIGTDNRLIARPALREPMREYPGMDHSEANSLGVTWHKMRQMWNNKNDLYLDDDHISNQPFLRALLGHCSNSAGSTNSWELKNKQFEAAVKQGAYSMDTAQFDELIRNMSQLMETGEVSDDLASQLIYQLVAELAKAQPTHMQWRGIQEETPPAAQLRGETGSVSQSSHAKNSGKLTFKPKGPVLMRQSQPPSISFNKTINSRIGNTVYITKRTEVINILCDLITPSEATYTWTKDGTLLQPSVKIILDGTGKIQIQNPTRKEQGIYECSVANHLGSDVESSSVLYAEAPVILSVERNITKPEHNHLSVVVGGIVEAALGANVTIRCPVKGVPQPNITWLKRGGSLSGNVSLLFNGSLLLQNVSLENEGTYVCIATNALGKAVATSVLHLLERRWPESRIVFLQGHKKYILQATNTRTNSNDPTGEPPPQEPFWEPGNWSHCSATCGHLGARIQRPQCVMANGQEVSEALCDHLQKPLAGFEPCNIRDCPARWFTSVWSQCSVSCGEGYHSRQVTCKRTKANGTVQVVSPRACAPKDRPLGRKPCFGHPCVQWEPGNRCPGRCMGRAVRMQQRHTACQHNSSDSNCDDRKRPTLRRNCTSGACDVCWHTGPWKPCTAACGRGFQSRKVDCIHTRSCKPVAKRHCVQKKKPISWRHCLGPSCDSTYTSQTATNKGAASHVKRDKPLEGS

SEQ ID NO: 3331 - protein, 167 aa, Homo sapiens
MERTAGKELALAPLQDWGEETEDGAVYSVSLRRQRSQRRSPAEGPGGSQAPSPIANTFLHYRTSKVRVLRAARLERLVGELVFGDREQDPSFMPAFLATYRTFVPTACLLGFLLPPMPPPPPPGVEIKKTAVQDLSFNKNLRTTLRISETTLPIRTWAVSEPFWAGR

SEQ ID NO: 3332 - protein, 62 aa, Homo sapiens
MPGEQQAEEEEEEEMQEEMVLLVKGEEDEGEEKYEVVKLKIPMDNKERHDLALSPRLECSGT

SEQ ID NO: 3333 - protein, 845 aa, Homo sapiens
FEVLWSDSSITSVTKSSSEVTEFISKLCQLYPEENLEKLIPCLAGPDAFYVERNHVDLDSGLRYLASLPSHVLKNDHVRRFLSTSSPPQQLQSPSPGNPSLSKVGTVMGVSGRPVCGVAGIPSSQSGAQHHGQHPAGSAAPLPHCSHAGSAGSALAYRTQMDTSPAILMPSSLQTPQTQEQNGILDWLRKLRLHKYYPVFKQLSMEKFLSLTEEDLNKFESLTMGAKKKLKTQLELEKEKSERRCLNPSAPPLVTSSGVARVPPTSHVGPVQSGRGSHAAELRVEVEQPHHQLPREGSSSEYSSSSSSPMGVQAREESSDSAEENDRRVEIHLESSDKEKPVMLLNHFTSSSARPTAQVLPVQNEASSNPSGHHPLPPQMLSAASHITPIRMLNSVHKPERGSADMKLLSSSVHSLLSLEERNKGSGPRSSMKVDKSFGSAMMDVLPASAPHQPVQVLSGLSESSSMSPTVSFGPRTKVVHASTLDRVLKTAQQPALVVETSTAATGTPSTVLHAARPPIKLLLSSSVPADSAISGQTSCPNNVQISVPPAIINPRTALYTANTKVAFSAMSSMPVGPLQGGFCANSNTASPSSHPSTSFANMATLPSCPAPSSSPALSSVPESSFYSSSGGGGSTGNIPASNPNHHHHHHHQQPPAPPQPAPPPPGCIVCTSCGCSGSCGSSGLTVSYANYFQHPFSGPSVFTFPFLPFSPMCSSGYVSAQQYGGGSTFPVVHAPYSSSGTPDPVLSGQSTFAVPPMQNFMAGTAGVYQTQGLVGSSNGSSHKKSGNLSCYNCGATGHRAQDCKQPSMDFNRPGKRAPWPRPPGSRRTSAHKCLVFMKSKLLSL

SEQ ID NO: 3334 - protein, 767 aa, Homo sapiens
MMASFQRSNSHDKVRRIVAEEGRTARNLIAWSVPLESKDDDGKPKCQTGGKSKRTIQGTHKTTKQSTAVDCKITSSTTGDKHFDKSPTKTRHPRKIDLRARYWAFLFDNLRRAVDEIYVTCESDQSVVECKEVLMMLDNYVRDFKALIDWIQLQEKLEKTDAQSRPTSLAWEVKKMSPGRHVIPSPSTDRINVTSNARRSLNFGGSTGTVPAPRLAPTGVSWADKVKAHHTGSTASSEITPAQSCPPMTVQKASRKNERKDAEGWETVQRGRPIRSRSTAVMPKVSLATEATRSKDDSDKENVCLLPDESIQKGQFVGDGTSNTIESHPKDSLHSCDHPLAEKTQFTVSTLDDVKNSGSIRDNYVRTSEISAVHIDTECVSVMLQAGTPPLQVNEEKFPAEKARIENEMDPSDISNVSAANLSMAEVLAKKEELADRLEKANEEAIASAIAEEEQLTREIEAEENNDINIETDNDSDFSASMGSGSVSFCGMSMDWNDVLADYEARESWRQNTSWGDIVEEEPARPPGHGIHMHEKLSSPSRKRTIAESKKKHEEKQMKAQQLREKLREEKTLKLQKLLEREKDVRKWKEELLDQRRRMMEEKLLHAEFKREVQLQAIVKKAQEEEAKVNEIAFINTLEAQNKRHDVLSKLKEYEQRLNELQEERQRRQEEKQARDEAVQERKRALEAERQARVEELLMKRKEQEARIEQQRQEKEKAREDAARERARDREERLAALTAAQQEAMEELQKKIQLKHDESIRRHMEQI

SEQ ID NO: 3335 - protein, 90 aa, Homo sapiens
MKDSCITVMAMALLSGFFFFERPNGKLYPQALGRAFRALGGPGVAPSIFPEVNALEGKRRVRVAWGATSGWAWDRPPAGHVQGRGSLGRS

SEQ ID NO: 3336 - protein, 1253 aa, Homo sapiens
MSGPTDETAGDLPVKDTGLNLFGMGGLQETSTTRTMKSRQAVSRVSREELEDRFLRLHDENILLKQHARKQEDKIKRMATKLIRLVNDKKRYERVGGGPKRLGRDVEMEEMIEQLQEKVHELEKQNETLKNRLISAKQQLQTQGYRQTPYNNVQSRINTGRRKANENAGLQECPRKGIKFQDADVAETPHPMFTKYGNSLLEEARGEIRNLENVIQSQRGQIEELEHLAEILKTQLRRKENEIELSLLQLREQQATDQRSNIRDNVEMIKLHKQLVEKSNALSAMEGKFIQLQEKQRTLRISHDALMANGDELNMQLKEQRLKCCSLEKQLHSMKFSERRIEELQDRINDLEKERELLKENYDKLYDSAFSAAHEEQWKLKEQQLKVQIAQLETALKSDLTDKTEILDRLKTERDQNEKLVQENRELQLQYLEQKQQLDELKKRIKLYNQENDINADELSEALLLIKAQKEQKNGDLSFLVKVDSEINKDLERSMRELQATHAETVQELEKTRNMLIMQHKINKDYQMEVEAVTRKMENLQQDYELKVEQYVHLLDIRAARIHKLEAQLKDIAYGTKQYKFKPEIMPDDSVDEFDETIHLERGENLFEIHINKVTFSSEVLQASGDKEPVTFCTYAFYDFELQTTPVVRGLHPEYNFTSQYLVHVNDLFLQYIQKNTITLEVHQAYSTEYETIAACQLKFHEILEKSGRIFCTASLIGTKGDIPNFGTVEYWFRLRVPMDQAIRLYRERAKALGYITSNFKGPEHMQSLSQQAPKTAQLSSTDSTDGNLNELHITIRCCNHLQSRASHLQPHPYVVYKFFDFADHDTAIIPSSNDPQFDDHMYFPVPMNMDLDRYLKSESLSFYVFDDSDTQENIYIGKVNVPLISLAHDRCISGIFELTDHQKHPAGTIHVILKWKFAYLPPSGSITTEDLGNFIRSEEPEVVQRLPPASSVSTLVLAPRPKPRQRLTPVDKKVSFVDIMPHQSDETSPPPEDRKEISPEVEHIPEIEINMLTVPHVPKVSQEGSVDEVKENTEKMQQGKDDVSLLSEGQLAEQSLASSEDETEITEDLEPEVEEDMSASDSDDCIIPGPISKNIKQPSEKIRIEIIALSLNDSQVTMDDTIQRLFVECRFYSLPAEETPVSLPKPKSGQWVYYNYSNVIYVDKENNKAKRDILKAILQKQEMPNRSLRFTVVSDPPEDEQDLECEDIGVAHVDLADMFQEGRDLIEQNIDGMGESVAQFVQPTIAELQTLY

SEQ ID NO: 3337 - protein, 135 aa, Homo sapiens
MTVLEQDTQGLDGWWLCSLHGRQGIVPGNRLKILVGMYDKKPAGPGPGPPATPAQPQPGLHAPAPPASQYTPMLPNTYQPQPDSVYLVPTPSKAQQGLYQVPGPSPQFQSPPAKQTSTFSKQTPHHPFPSPATDL

SEQ ID NO: 3338 - protein, 581 aa, Homo sapiens
YESMKQDFKLGIPEYFNFAKDVLDQWTDKEKAGKKPSNPAFWWINRNGEEMRWSFEELGSLSRKFANILSEACSLQRGDRVILILPRVPEWWLANVACLRTGTVLIPGTTQLTQKDILYRLQSSKANCIITNDVLAPAVDAVASKCENLHSKLIVSENSREGWGNLKELMKVFLCHPGWSTVARSWLTATSTSLVQAILSLLSSWDYRHASDSHTCVKTKHNEIMAIFFTSGTSGYPKMTAHTHSSFGLGLSVNGRFWLDLTPSDVMWNTSDTGWAKSAWSSVFSPWIQGACVFTHHLPRFEPTSILQTLSKYPITVFCSAPTVYRMLVQNDITSYKFKSLKHCVSAGEPITPDVTEKWRNKTGLDIYEGYGQTETVLICGNFKGMKIKPGSMGKPSPAFDVKIVDVNGNVLPPGQEGDIGIQVLPNRPFGLFTHYVDNPSKTASTLRGNFYITGDRGYMDKDGYFWFVARADDVILSSGYRIGPFEVENALNEHPSVAESAVVSSPDPIRGEVVKAFVVLNPDYKSHDQEQLIKEIQEHVKKTTAPYKYPRKVEFIQELPKTISGKTKRNELRKKEWKTI

SEQ ID NO: 3339 - protein, 203 aa, Homo sapiens
MKDSCITVMAMALLSGFFFFAPASSYNLDVRGARSFSPPRAGRHFGYRVLQVGNGVIVGAPGEGNSTGSLYQCQSGTGHCLPVTLRGSNYTSKYLGMTLATDPTDGSILFAAVQFSTSYKTEFDFSDYVKRKDPDALLKHVKHMLLLTNTFGAINYVATEVFREELGARPDATKVLIIITDGEATDSGNIDAAKDIIRYIIGV

SEQ ID NO: 3340 - protein, 226 aa, Homo sapiens
MARSGSATPPARAPGAPPRSPPQRLVQDVSGPLRELRPRLCHLRKGPQGYGFNLHSDKSRPGQYIRSVDPGSPAARSGLRAQDRLIEVNGQNVEGLRHAEVVASIKAREDEARLLVVDPETDEHFKRLRVTPTEEHVEGPLPSPVTNGTSPAQLNGGSACSSRSDLPGSDKDTEDGSAWKQDPFQESGLHLSPTAAEAKEKARAMRVNKRAPQMDWNRKREIFSNF

SEQ ID NO: 3341 - protein, 128 aa, Homo sapiens
MTVLEQDTQGLDGWWLCSLHGRQGIVPGNRLKILVGMYDKKPAGPGPGPPATPAQPQPGLHAPAPPASQYTPMLPNTYQPQPDSVYLVPTPSKAQQGLYQVPGPSPQFQSPPAKQTSTFSKQTPHHPF

SEQ ID NO: 3342 - protein, 507 aa, Homo sapiens; identical to SEQ ID NO: 3284

SEQ ID NO: 3343 - protein, 299 aa, Homo sapiens
MTTLSPENSLSARQSASFILVKRKPPIDKTEWDSFFDESGHLAKSRDFICVNILERGLHPFVRTEAWKFLTGYFSWQSSQDERLTVDSMRRKNYKALCQMYEKIQPLLENLHRNFTETRNNIEYQQGFHEMMMLFQLMVEHDHETFWLFQFFLQKTEHSCVINIGVAKNLDMLSTLITFLDPVFAEHLKGKGAGAVQSLFPWFCFCFQRAFKSFDDVWRLWEVLLTGKPCRNFQVLVAYSMLQMVREQVLQESMGGDDILLACNNLIDLDADELISAACVVYAELIQKDVPQTLKDFFL

SEQ ID NO: 3344 - protein, 58 aa, Homo sapiens
MTVLEQDTQGLDGWWLCSLHGRQGIVPGNRLKILVGMYDKKPAGPGPGPPATPAQPQP

SEQ ID NO: 3345 - protein, 1122 aa, Homo sapiens
PTPGLHLVTMTAGNPLGSANATVEVDVQVPVSGLSIRASEPGGSFVAAGSSVPFWGQLATGTNVSWCWAVPGGSSKRGPHVTMVFPDAGTFSIRLNASNAVSWVSATYNLTAEEPIVGLVLWASSKVVAPGQLVHFQILLAAGSAVTFRLQVGGANPEVLPGPRFSHSFPRVGDHVVSVRGKNHVSWAQAQVRIVVLEAVSGLQVPNCCEPGIATGTERNFTARVQRGSRVAYAWYFSLQKVQGDSLVILSGRDVTYTPVAAGLLEIQVRAFNALGSENRTLVLEVQDAVQYVALQSGPCFTNRSAQFEAATSPSPRRVAYHWDFGDGSPGQDTDEPRAEHSYLRPGDYRVQVNASNLVSFFVAQATVTVQVLACREPEVDVVLPLQVLMRRSQRNYLEAHVDLRDCVTYQTEYRWEVYRTASCQRPGRPARVALPGVDVSRPRLVLPRLALPVGHYCFVFVVSFGDTPLTQSIQANVTVAPERLVPIIEGGSYRVWSDTRDLVLDGSESYDPNLEDGDQTPLSFHWACVASTQREAGGCALNFGPRGSSTVTIPRERLAAGVEYTFSLTVWKAGRKEEATNQTVLIRSGRVPIVSLECVSCKAQAVYEVSRSSYVYLEGRCLNCSSGSKRGRWAARTFSNKTLVLDETTTSTGSAGMRLVLRRGVLRDGEGYTFTLTVLGRSGEEEGCASIRLSPNRPPLGGSCRLFPLGAVHALTTKVHFECTGWHDAEDAGAPLVYALLLRRCRQGHCEEFCVYKGSLSSYGAVLPPGFRPHFEVGLAVVVQDQLGAAVVALNRSLAITLPEPNGSATGLTVWLHGLTASVLPGLLRQADPQHVIEYSLALVTVLNEYERALDVAAEPKHERQHRAQIRKNITETLVSLRVHTVDDIQQIAAALAQCMGPSRELVCRSCLKQTLHKLEAMMLILQAETTAGTVTPTAIGDSILNITGDLIHLASSDVRAPQPSELGAESPSRMVASQAYNLTSALMRILMRSRVLNEEPLTLAGEEIVAQGKRSDPRSLLCYGGAPGPGCHFSIPEAFSGALANLSDVVQLIFLVDSNPFPFGYISNYTVSTKLRQLRQLRCGPAPGLRRCCGHPGQQQPCGRAASAAQLYAAGRPLPV

SEQ ID NO: 3346 - protein, 3375 aa, Homo sapiens
MASERPEPEVEEAGQVFLLMKKDYRISRNVRLAWFLSHLHQTVQATPQEMLLQSEQELEVLSVLPPGWQPDEPVVPRPFLLVPSTRVTFLAWQYRFVIELDLSPSTGIVDDSTGEILFDEVFHALSRCLGGLLRPFRVPGSCIDFQPEIYVTIQAYSSIIGLQSHQVLVQGCLLDPSQREVFLQQIYEQLCLFEDKVATMLQQQYDPQSQAEDQSPDSGDLLGRKVGVSMVTADLGLVSMIRQGILALQLLPSNSSAGIIVITDGVTSVPDVAVCETLLNQLRSGTVACSFVQVGGVYSYDCSFGHVPNVELMKFIAMATFGSYLSTCPEPEPGNLGLTVYHRAFLLYSFLRSGEALNPEYYCGSQHRLFNEHLVSASSNPALALRRKKHTEKEVPADLVSTVSVRLREGYSVREVTLAKGGSQLEVKLVLLWKHNMRIEYVAMAPWPLEPEGPRVTRVEVTMEGGYDILHDVSCALRQPIRSLYRTHVIRRFWNTLQSINQTDQMLAHLQSFSSVPEHFTLPDSTKSGVPLFYIPPGSTTPVLSLQPSGSDSSHAQFAAYWKPVLSMDANSWQRWLHMHRLVLILEHDTPIPKHLHTPGSNGRYSTIQCRISHSSLTSLLRDWSSFVLVEGYSYVKLLSSAPDQPPNSFYMVRIISKAPCMVLRLGFPIGTPAPARHKIVSGLREEILRLRFPHRVQSKEPTPKVKRKGLGGAGGGSSPSKSPPVLGPQQALSDRPCLVVLHKPLDKLLIRYEKLPLDYRAPFLLTLEPPGPLPLVSGRSASSSLASLSRYLYHQRWLWSVPSGLAPALPLSAIAQLLSILTEVRLSEGFHFACSGEGIINMVLELPIQNEPPGQAAAEEKHTCVVQYILFPPHSTSTKDSFSTDDDNDVEVEALEGDSELNLVTEVWVEPQYGRVGPGPGIWKHLQDLTYSEIPQALHPRDAACIGSMLSFEYLIQLCQSKEWGPLPPEPRVSDGLDQGGDTCVHEIPFHFDLMGLLPQCQQLQMFFLLLARGAEGPLLGVHGIPKEQAVGSTQATGDSAFTSLSVGLPETLKPLISAQPPQWRCYARLVNPQHVFLTFLPATFSDVQRLAACGLEGPPQEETKPKFGDWSGAPSLKDLGGTGIKATKSHVPVLSVTLASDNAQNQGELSPPFRRDLQAYAGRQASQTESADGPRTRCPVYIYSCSLEALREQMVGMQPPQAPRDLIFRTQFLDHPSPSSAWMEPRYKEAANHCALLQEHAQRCYVRGLFRSLQQAQSVTSQDLLTAVDACEELLQEIDITPFLLALCGHTWGLPHAPPSPGPLSPGPFSSSMEEGAEPRERAILASESSIETEDLSEPEFQSTRVPGIPDPGPEISLTDVCQLRGEAHGALHSVIQEKFLEISRLHFRTVPSNPHYFFYCPPSSRREDEGPRDTVDRKISDLEFSEAELMGEEGDTSACCVVTESDPELEVEYRESRESDLGPAGLDSASLSDVDTVNPDEDSFSILGGDSPTGPESFLHDLPPLFLHLTCSVRLRGQHSSVPVCSLPTCLGQVLSSLEGPPVGGRVPLRDLSVTLDVFMLTLPLEVELPTASDPQHHRSTSESSASFPRSPGQPSSLRSDDGLGPPLPPPEEERHPGLSNLATPHRLAIETTMNEIRWLLEDEMVGALRRGGIPQSPALHRAAAHIHSSPGRSTCLRQTLPLSFVFGPERSLTQFKEEFRRLHLPGHVLLEDPDSGFFFVAAGQQPGGSHGEPSSAAWAWHSHEDRAEGIEGETLTASPQAPGSPEDSEGVPLISLPRVPQGGSQPGPSRGLSLMSSQGSVDSDHLGYDGGSSGSDSEGPNDTLGEKAPFTLRTPPGPAPPQPSLSGLPGPCLPDFWLIVRVLQDRVEVYAHARSLIREDGGPGTECRHLQQLLVRRVGEICREVNQRLLLQDLHDSHVCNSLLVAESEEDLWRSETPFHSRQRAPLPSDDYAADESCAPRGYLAATMQFVPGHFSCDVVWGTVIRVHSRLKMGPSMGVSRAIQALRSVLNAFSVVNRKNMFVYQERATKAVYYLRLLETSCSDRPWKGDALPPSLALSRSQEPIYSEEASGPRSPLDMVSSRSSDAARPVGQVDRHIQLLVHGVGQAGPEITDELVRVLCRRLDEATLDVITVMLVRNCKLTPADVEFIQPPGSLPSEVLHLALPTSCRPWLPALAWYLRQNLLIFLHSPKYTDSNSRNHFQHPLPPQGGLPDLDIYLYNKPGGQGTGGKGVACITLAFVDEGGAPLSLALWPPSSPGPPDPLREEEFEQLTQVIRCPVVVDSSSAQNGAPRLRLDVWEKGNISIVQLEEKLRGAARQALADAIIELQLLPASLCTEDTPTGSLRNGSLETKSSAGRASTFPPAPVPGEPVTPPSKAGRRSFWDMLSKTECGDLGSPKTTDDIVLDRPEDTRGRRRHKTESVRTPGGAERAPGSDSGAQRQKRRTTQLEEGEVGTLHPVFARVAQRWMEFMVQIGCASVSRSSAHMVSRFLLPSILSEFTALVTSMAGDTSVRIFEQHLGSEPEIFGPCSPGQLGPSPRPAAERHLLLLGRNFLQWRRPTQQAAKAMQRFEPGGDGSSGRNAPRQRLLLLEVVDKKLQLLTYNWAPDLGAALGRALVRLVQWQNARAHLIFCLLSQKLGLFHHYGQLDFPVRDEKEPNPFLLPTMEVETLIRSASPPLSREQGRLSGSSRGGGPLPLDTFPFDEALRDITAARPSSVLGPVPRPPDPVTYHGQQFLEIKMAERRELERQMKMENLFVTWQQRSTPATMPISAGELETLKQSSRLVHYCATAMLFDPAAWLHGPPETSGPPDGQRRHRPESGSGSREAPTSCESLDVSPPGAREEPWLKELSLAFLQQYVQYLQSIGFVLVPLRPPSPARSTSRPRAMAILGTEGRGSFSCPKTKTDGSPKSTSSPVTTYHLQRALPGGIILMELAFQGCYFCVKQFALECSRIPMGQAVNSQLSMLFTEECDKVRDLMHVHSFSYDFHLRLVHQHVLGAHLVLRHGYHLTTFLRHFLAHHPDGPHFGRNHIYQGTLELPTPLIAAHQLYNYVADHASSYHMKPLRMARPGGPEHNEYALVSAWHSSGSYLDSEGLRHQDDFDVSLLVCHCAAPFEEQGEAERHVLRLQFFVVLTSQRELFPRLTADMRRFRKPPRLPPEPEAPGSSAGSPGEASGLILAPGPAPLFPPLAAEVGMARARLAQLVRLAGGHCRRDTLWKRLFLLEPPGPDRLRLGGRLALAELEELLEAVHAKSIGDIDPQLDCFLSMTVSWYQSLIKVLLSRFPQSCRHFQSPDLGTQYLVVLNQKFTDCFVLVFLDSHLGKTSLTVVFREPFPVQPQDSESPPAQLVSTYHHLESVINTACFTLWTRLL

SEQ ID NO: 3347 - protein, 50 aa, Homo sapiens
MTVLEQDTQGLDGWWLCSLHGRQGIVPGNRLKILVGMYDKKPAGPGPGPP

SEQ ID NO: 3348 - protein, 150 aa, Homo sapiens
MVKNVLERPEDQRLIYSGKLLLDHQCLRDLLPKVAESTEEPAGSNRGQYPEDSSSDGLRQREVLRNLSSPGWENISRPEAAQQAFQGLGPGFSGYTPYGWLQLSWFQQIYARQYYMQYLAATAASGAFVPPPSAQEIPVVSAPAPAPIHN

SEQ ID NO: 3349 - protein, 184 aa, Homo sapiens
VDSAGSYISHDILHNGRKKRSAQNARSSLHYRFSAFGQELHLELKPSAILSSHFIVQVLGKDGASETQKPEVQQCFYQGFIRNDSSSSVAVSTCAGLLLAQEHNYSSPAGHHPHVLYKRTAEEKIQRYRGYPGSGRNYPGYSPSHIPHASQSRETEYHHRRLQKQHFCGRRKKCICSQASHRGH

SEQ ID NO: 3350 - protein, 734 aa, Homo sapiens
MPAKGRYFLNEGEEGPDQDALYEKYQLTSQHGPLLLTLLLVAATACVALIIIAFSQGDPSRHQAILGMAFLVLAVFAALSVLMYVECLLRRWLRALALLTWACLVALGYVLVFDAWTKAACAWEQVPFFLFIVFVVYTLLPFSMRGAVAVGAVSTASHLLVLGSLMGGFTTPSVRVGLQLLANAVIFLCGNLTGAFHKHQMQDASRDLFTYTVKCIQIRRKLRIEKRQQENLLLSVLPAHISMGMKLAIIERLKEHGDRRCMPDNNFHSLYVKRHQNVSILYADIVGFTQLASDCSPKELVVVLNELFGKFDQIAKANECMRIKILGDCYYCVSGLPVSLPTHARNCVKMGLDMCQAIKQVREATGVDINMRVGIHSGNVLCGVIGLRKWQYDVWSHDVSLANRMEAAGVPGRVHITEATLKHLDKAYEVEDGHGQQRDPYLKEMNIRTYLVIDPRSQQPPPPSQHLPRPKGDAALKMRASVRMTRYLESWGAARPFAHLNHRESVSSGETHVPNGRRPKSVPQRHRRTPDRSMSPKGRSEDDSYDDEMLSAIEGLSSTRPCCSKSDDFYTFGSIFLEKGFEREYRLAPIPRARHDFACASLIFVCILLVHVLLMPRTAALGVSFGLVACVLGLVLGLCFATKFSRCCPARGTLCTISERVETQPLLRLTLAVLTIGSLLTVAIINLPLMPFQVPELPVGNETGLLAASSKTRALCEPLPHLHTVFSRLNELTS

SEQ ID NO: 3351 - protein, 80 aa, Homo sapiens
MTVLEQDTQGLDGWWLCSLHGRQGIVPGNRLKILVGMYDKKPAGPGPGPPATPAQPQPGLHAPAPPASQYTPMLPNTYQP

SEQ ID NO: 3352 - protein, 179 aa, Homo sapiens
NFQPKMGELYMLLAAELSSCSAFFVAVALTNLEDIENAKRAYAEAVHLDKCNPLVNLNYAVLLYNQGEKKNALAQYQEMEKKVSLLKDNSSLEFDSEMVEMAQKLGAALQVGEALVWTKPVKDPKSKHQTTSTSKPASFQQPLGSNQALGQAMSSAAAYRTLPSGAGGTSQFTKPPSLP

SEQ ID NO: 3353 - protein, 75 aa, Homo sapiens
MATVLKTIVLIPCIGVLEQNNFSLNRRMQKARHCGHCPEEWITYSNSCYYIGKERRTWEERVCWPVLRRTLICFL

SEQ ID NO: 3354 - protein, 1097 aa, Homo sapiens
MDFLRLYLPGLHQALRGALDSLGTFVSYLLGDAVPTVEREAQAAEELGVVAVGKTGKIVEEEAQEDLEGLRGSQNEGAGRLRGPGDDRRHEVGSSAVEQTWGWGDGSSHGSQAERQDSGAGETAKAARCQEPSAHLEARKKSKAGSGACQDRSGQAQERQESHEQEVNREERLRSWEQEEEEEEVRAREPGMARGAESEWTWHGETEGKAGAVGPKAAGDNREMEQGVREADAGETEEPGAEGAGKGEEVVVVEKACESTRAWGTWGPGAEPEDWGILGREEARTTPGREEARAILDGEEARTISGGEEAETASGGEEAETASGGEEAGTASGGEEAGIASGGEAGTASGGEEAGTASGGEEAGTASGGDEAWTTSGKEEADLLGVRQTEYGAVPGERLLEATGKVWVLEEEGDEEREAEVSPFPKQPQVLGTERTEEAAESQTAGREAVGGQEAGESFEGQVDLRGKEAEMRQDLGIRADRARMEELVQAEEAQEERGSSRDPVAELPSDGEAEGTADLEATPEARPEEELTGEESEAAQTSCGLLGVEWGGLTHSVTKGQGPELMGGAQTPTKQPEEREAGEVELMGVLALSKEEQERSLEAGPRHAGSVKPEASEAFPGAWENRTRKDMERGNTQEDAADGEQREEEETAGGQTLAAEAEGDRESELSEVPEAGGEGLTTQDAGCGTEEGEASVSENQELDGSTGADAGPCPSLGEAYARETEDEEAEADRTSRRGWRLQAVAVGLPDREDAQTGSVAAGIMGGDVVPHISAAGAGEALEGVLGQGWDSKEKEEAAAGEHAGGQEFGLEGSAEEEVTGRGSQVEAFESREGGPWGGRVEAEESAGAEDSCGLDPAGSQTARAEGMGAMVEAGGLLEKWTLLEEEAVGWQEREQREDSEGRCGDYHPEGEAPRLLDAEGLMVTGGRRAEAKETEPESLEHVRGQEEQPTHQAPAEAAPESVGEAETAEAMGSARGGAANSWSEAPLPGSLLDVSVPRSRVHLSRSSSQRRSRPSFRRTPAWEQQEEPPAPNPPEEELSAPEQRPLQLEEPLEPSPLRHDGTPVPARRRPLGHGFGLAHPGMMQELQARLGRPKPQ

SEQ ID NO: 3355 - protein, 1083 aa, Homo sapiens
PYKPQWCRSREAWALYLFSPQNRFRVSCQKVITHKMFDHVVLVFIFLNCVTIALERPDIDPGSTERVFLSVSNYIFTAIFVAEMMVKVVALGLLSGEHAYLQSSWNLLDGLLVLVSLVDIVVAMASAGGAKILGVLRVLRLLRTLRPLRVISRAPGLKLVVETLISSLRPIGNIVLICCAFFIIFGILGVQLFKGKFYYCEGPDTRNISTKAQCRAAHYRWVRRKYNFDNLGQALMSLFVLSSKDGWVNIMYDGLDAVGVDQQPVQNHNPWMLLYFISFLLIVSFFVLNMFVGVVVENFHKCRQHQEAEEARRREEKRLRRLERRRRSTFPSPEAQRRPYYADYSPTRRSIHSLCTSHYLDLFITFIICVNVITMSMEHYNQPKSLDEALKYCNYVFTIVFVFEAALKLVAFGFRRFFKDRWNQLDLAIVLLSLMGITLEEIEMSAALPINPTIIRIMRVLRIARVLKLLKMATGMRALLDTVVQALPQVGNLGLLFMLLFFIYAALGVELFGRLECSEDNPCEGLSRHATFSNFGMAFLTLFRVSTGDNWNGIMKDTLRECSREDKHCLSYLPALSPVYFVTFVLVAQFVLVNVVVAVLMKHLEESNKEAREDAELDAEIELEMAQGPGSARRVDADRPPLPQESPGARDAPNLVARKVSVSRMLSLPNDSYMFRPVVPASAPHPRPLQEVEMETYGAGTPLESCASLQIPLAVSSPARSGEPLHALSPRGTARSPSLSRLLCRQEAVHTDSLEGKIDSPRDTLDPAEPGEKTPVRPVTQGGSLQSPPRSPRPASVRTRKHTFGQRCVSSRPAAPGGEEAEASDPADEEVSHITSSACPWQPTAEPHGPEASPVAGGERDLRRLYSVDAQGFLDKPGRADEQWRPSAELGSGEPGEAKAWGPEAEPALGARRKKKMSPPCISVEPPAEDEGSARPSAAEGGSTTLRRRTPSCEATPHRDSLEPTEGSGAGGDPAAKGERWGQASCRAEHLTVPSFAFEPLDLGVPSGDPFLDGSHSVTPESRASSSGAIVPLEPPESEPPMPVGDPPEKRRGLYLTVPQCPLEKPGSPSATPAPGGGADDPV

SEQ ID NO: 3356 - protein, 1012 aa, Homo sapiens
MKNKLQDPSNQKCGGRKKTVSFSSMPSEKKISSANDCISFMQAGCELKKVRPNSRIYNRFFTLDTDLQALRWEPSKKDLEKAKLDISAIKEIRLGKNTETFRNNGLADQICEDCAFSILHGENYESLDLVANSADVANIWVSGLRYLVSRSKQPLDFMEGNQNTPRFMWLKTVFEAADVDGNGIMLEDTSVELIKQLNPTLKEAKIRLKFKEIQKSKEKLTTRVTEEEFCEAFCELCTRPEVYFLLVQISKNKEYLDANDLMLFLEAEQGVTHITEDICLDIIRRYELSEEGRQKGFLAIDGFTQYLLSSECDIFDPEQKKVAQDMTQPLSHYYINASHNTYLIEDQFRGPADINGYIRALKMGCRSVELDVSDGSDNEPILCNRNNMTTHVSFRSVIEVINKFAFVASEYPLILCLGNHCSLPQQKVMAQQMKKVFGNKLYTEAPLPSESYLPSPEKLKRMIIVKGKKLPSDPDVLEGEVTDEDEEAEMSRRMSVDYNGEQKQIRLCRELSDLVSICKSVQYRDFELSMKSQNYWEMCSFSETEASRIANEYPEDFVNYNKKFLSRIYPSAMRIDSSNLNPQDFWNCGCQIVAMNFQTPGPMMDLHTGWFLQNGGCGYVLRPSIMRDEVSYFSANTKGILPGVSPLALHIKIISGQNFPKPKGACAKGDVIDPYVCIEIHGIPADCSEQRTKTVQQNSDNPIFDETFEFQVNLPELAMIRFVVLDDDYIGDEFIGQYTIPFECLQPGYRHVPLRSFVGDIMEHVTLFVHIAITNRSGGGKAQKRSLSVRMGKKVREYTMLRNIGLKTIDDIFKIAVHPLREAIDMRENMQNAIVSIKELCGLPPIASLKQCLLTLSSRLITSDNTPSVSLVMKDSFPYLEPLGAIPDVQKKMLTAYDLMIQESRFLIEMADTVQEKIVQCQKAGMEFHEELHNLGAKEGLKGRKLNKATESFAWNITVLKGQGDLLKNAKNEAIENMKQIQLACLSCGLSKAPSSSAEAKSKRSLEAIEEK

SEQ ID NO: 3357 - protein, 1548 aa, Homo sapiens
MPSDFISLLSADLDLESPKSLYSRDSLKLHPSQNFHRAGLLEESVYDLLPKELQLPPSRETSVASMSQTSGGEAGSPPPAVVAADASSAPSSSSMGGACSSFTTSSSPTIYSTSVTDSKAMQVESCSSAVGVSNRGVSEKQLTSNTVQQHPSTPKRHTVLYISPPPEDLLDNSRMSCQDEGCGLESEQSCSMWMEDSPSNFSNMSTSSYNDNTEVPRKSRKRNPKQRPGVKRRDCEESNMDIFDADSAKAPHYVLSQLTTDNKGNSKAGNGTLENQKGTGVKKSPMLCGQYPVKSEGKELKIVVQPETQHRARYLTEGSRGSVKDRTQQGFPTVKLEGHNEPVVLQVFVGNDSGRVKPHGFYQACRVTGRNTTPCKEVDIEGTTVIEVGLDPSNNMTLAVDCVGILKLRNADVEARIGIAGSKKKSTRARLVFRVNIMRKDGSTLTLQTPSSPILCTQPAGVPEILKKSLHSCSVKGEEEVFLIGKNFLKGTKVIFQENVSDENSWKSEAEIDMELFHQNHLIVKVPPYHDQHITLPVSVGIYVVTNAGRSHDVQPFTYTPDPAAGALNVNVKKEISSPARPCSFEEAMKAMKTTGCNLDKVNIIPNALMTPLIPSSMIKSEDVTPMEVTAEKRSSTIFKTTKSVGSTQQTLENISNIAGNGSFSSPSSSHLPSENEKQQQIQPKAYNPETLTTIQTQDISQPGTFPAVSASSQLPNSDALLQQATQFQTRETQSREILQSDGTVVNLSQLTEASQQQQQSPLQEQAQTLQQQISSNIFPSPNSVSQLQNTIQQLQAGSFTGSTASGSSGSVDLVQQVLEAQQQLSSVLFSAPDGNENVQEQLSADIFQQVSQIQSGVSPGMFSSTEPTVHTRPDNLLPGRAESVHPQSENTLSNQQQQQQQQQQVMESSAAMVMEMQQSICQAAAQIQSELFPSTASANGNLQQSPVYQQTSHMMSALSTNEDMQMQCELFSSPPAVSGNETSTTTTQQVATPGTTMFQTSSSGDGEETGTQAKQIQNSVFQTMVQMQHSGDNQPQVNLFSSTKSMMSVQNSGTQQQGNGLFQQGNEMMSLQSGNFLQQSSHSQAQLFHPQNPIADAQNLSQETQGSLFHSPNPIVHSQTSTTSSEQMQPPMFHSQSTIAVLQGSSVPQDQQSTNIFLSQSPMNNLQTNTVAQEAFFAAPNSISPLQSTSNSEQQAAFQQQAPISHIQTPMLSQEQAQPPQQGLFQPQVALGSLPPNPMPQSQQGTMFQSQHSIVAMQSNSPSQEQQQQQQQQQQQQQQQQQSILFSNQNTMATMASPKQPPPNMIFNPNQNPMANQEQQNQSIFHQQSNMAPMNQEQQPMQFQSQSTVSSLQNPGPTQSESSQTPLFHSSPQIQLVQGSPSSQEQQVTLFLSPASMSALQTSINQQDMQQSPLYSPQNNMPGIQGATSSPQPQATLFHNTAGGTMNQLQNSPGSSQQTSGMFLFGIQNNCSQLLTSGPATLPDQLMAISQPGQPQNEGQPPVTTLLSQQMPENSPLASSINTNQNIEKIDLLVSLQNQGNNLTGSF

SEQ ID NO: 3358 - protein, 134 aa, Homo sapiens
KWRNKTGLDIYEGYGQTETVLICGNFKGMKIKPGSMGKPSPAFDVKIVDVNGNVLPPGQEGDIGIQVLPNRPFGLFTHYVVVKAFVVLNPDYKSHDQEQLIKEIQEHVKKTTAPYKYPRKVEFIQELPKTISGK

SEQ ID NO: 3359 - protein, 103 aa, Homo sapiens
MTKLEYEEIALDLTPVIEELTNAGFLQTESELQELSEVLELLSAPELKSLAKTFHLVNPNGQKQQLVDAFLKLAKQRSVCTWGKNKPGIGAVILKRFCWLLLQ

SEQ ID NO: 3360 - protein, 165 aa, Homo sapiens
SHSSEAGKKDVSGPLRELRPRLCHLRKGPQGYGFNLHSDKSRPGQYIRSVDPGSPAARSGLRAQDRLIEVNGQNVEGLRHAEVVASIKAREDEARLLVVDPETDEHFKRLRVTPTEEHVEGPLPSPVTNGTSPAQLNGGSACSSRSDLPGSDKDTEEGPPSGVWD

SEQ ID NO: 3361 - protein, 431 aa, Homo sapiens
MALARGSRQLGALVWGACLCVLVHGQQAQPGQGSDPARWRQLIQWENNGQVYSLLNSGSEYVPAGPQRSESSSRVLLAGAPQAQQRRSHGSPRRRQAPSLPLPGRVGSDTVRGQARHPFGFGQVPDNWREVAVGDSTGMARARTSVSQQRHGGSASSVSASAFASTYRQQPSYPQQFPYPQAPFVSQYENYDPASRTYDQGFVYYRPAGGGVGAGAAAVASAGVIYPYQPRARYEEYGGGEELPEYPPQGFYPAPERPYVPPPPPPPDGLDRRYSHSLYSEGTPGFEQAYPDPGPEAAQAHGGDPRLGWYPPYANPPPEAYGPPRALEPPYLPVRSSDTPPPGGERNGAQQGRLSVGSVYRPNQNGRVTPAQTPACPGRKVEGQEQDGQAPGSGTSWGTRDHKDGGSLQTSPGRLTPGLAGERARASLRSP

SEQ ID NO: 3362 - protein, 1004 aa, Homo sapiens
MPKIVLNGVTVDFPFQPYKCQQEYMTKVLECLQQKVNGILESPTGTGKTLCLLCTTLAWREHLRDGISARKIAERAQGELFPDRALSSWGNAAAAAGDPIACYTDIPKIIYASRTHSQLTQVINELRNTSYRPKVCVLGSREQLCIHPEVKKQESNHLQIHLCRKKVASRSCHFYNNVEEKSLEQELASPILDIEDLVKSGSKHRVCPYYLSRNLKQQADIIFMPYNYLLDAKSRRAHNIDLKGTVVIFDEAHNVEKMCEESASFDLTPHDLASGLDVIDQVLEEQTKAAQQGEPHPEFSADSPSPGLNMELEDIAKLKMILLRLEGAIDAVELPGDDSGVTKPGSYIFELFAEAQITFQTKGCILDSLDQIIQHLAGRAGVFTNTAGLQKLADIIQIVFSVDPSEGSPGSPAGLGALQSYKVHIHPDAGHRRTAQRSDAWSTTAARKRGKVLSYWCFSPGHSMHELVRQGVRSLILTSGTLAPVSSFALEMQIPFPVCLENPHIIDKHQIWVGVVPRGPDGAQLSSAFDRRFSEECLSSLGKALGNIARVVPYGLLIFFPSYPVMEKSLEFWRARDLARKMEALKPLFVEPRSKGSFSETISAYYARVAAPGSTGATFLAVCRGKASEGLDFSDTNGRGVIVTGLPYPPRMDPRVVLKMQFLDEMKGQGGAGGQFLSGQEWYRQQASRAVNQAIGRVIRHRQDYGAVFLCDHRFAFADARAQLPSWVRPHVRVYDNFGHVIRDVAQFFRVAERTMPAPAPRATAPSVRGEDAVSEAKSPGPFFSTRKAKSLDLHVPSLKQRSSGSPAAGDPESSLCVEYEQEPVPARQRPRGLLAALEHSEQRAGSPGEEQAHSCSTLSLLSEKRPAEEPRGGRKKIRLVSHPEEPVAGAQTDRAKLFMVAVKQELSQANFATFTQALQDYKGSDDFAALAACLGPLFAEDPKKHNLLQGFYQFVRPHHKQQFEEVCIQLTGRGCGYRPEHSIPRRQRAQPVLDPTERRRIPS

SEQ ID NO: 3363 - protein, 1281 aa, Homo sapiens
MSGPTDETAGDLPVKDTGLNLFGMGGLQETSTTRTMKSRQAVSRVSREELEDRFLRLHDENILLKQHARKQEDKIKRMATKLIRLVNDKKRYERVGGGPKRLGRDVEMEEMIEQLQEKVHELEKQNETLKNRLISAKQQLQTQGYRQTPYNNVQSRINTGRRKANENAGLQECPRKGIKFQDADVAETPHPMFTKYGNSLLEEARGEIRNLENVIQSQRGQIEELEHLAEILKTQLRRKENEIELSLLQLREQQATDQRSNIRDNVEMIKLHKQLVEKSNALSAMEGKFIQLQEKQRTLRISHDALMANGDELNMQLKEQRLKCCSLEKQLHSMKFSERRIEELQDRINDLEKERELLKENYDKLYDSAFSAAHEEQWKLKEQQLKVQIAQLETALKSDLTDKTEILDRLKTERDQNEKLVQENRELQLQYLEQKQQLDELKKRIKLYNQENDINADELSEALLLIKAQKEQKNGDLSFLVKVDSEINKDLERSMRELQATHAETVQELEKTRNMLIMQHKINKDYQMEVEAVTRKMENLQQDYELKVEQYVHLLDIRAARIHKLEAQLKDIAYGTKQYKFKPEIMPDDSVDEFDETIHLERGENLFEIHINKVTFSSEVLQASGDKEPVTFCTYAFYDFELQTTPVVRGLHPEYNFTSQYLVHVNDLFLQYIQKNTITLEVHQAYSTEYETIAACQLKFHEILEKSGRIFCTASLIGTKGDIPNFGTVEYWFRLRVPMDQAIRLYRERAKALGYITSNFKGPEHMQSLSQQAPKTAQLSSTDSTDGNLNELHITIRCCNHLQSRASHLQPHPYVVYKFFDFADHDTAIIPSSNDPQFDDHMYFPVPMNMDLDRYLKSESLSFYVFDDSDTQENIYIGKVNVPLISLAHDRCISGIFELTDHQKHPAGTIHVILKWKFAYLPPSGSITTEDLGNFIRSEEPEVVQRLPPASSVSTLVLAPRPKPRQRLTPVDKKVSFVDIMPHQSDVSQEGSVDEVKENTEKMQQGKDDVSLLSEGQLAEQSLASSEDETEITEDLEPEVEEDMSASDSDDCIIPGPISKNIKQSLALSPGLGCSSAISAHCNFRLPGSSDFPASASQVDGITGACHHTQPSEKIRIEIIALSLNDSQVTMDDTIQRLFVECRFYSLPAEETPVSLPKPKSGQWVYYNYSNVIYVDKENNKAKRDILKAILQKQEMPNRSLRFTVVSDPPEDEQDLECEDIGVAHVDLADMFQEGRDLIEQNIDVFDARADGEGIGKLRVTVEALHALQSVYKQYRDDLEA

SEQ ID NO: 3364 - protein, 455 aa, Homo sapiens
MDSPGYNCFVDKDKMDAAIQDLGPKELSCTELQELKQLARQGYWAQSHALRGKVYQRLIRDIPCRTVTPDASVYSDIVGKIVGKHSSSCLPLPEFVDNTQVPSYCLNARGEGAVRKILLCLANQFPDISFCPALPAVVALLLHYSIDEAECFEKACRILACNDPGRRLIDQSFLAFESSCMTFGDLVNKYCQAAHKLMVAVSEDVLQVYADWQRWLFGELPLCYFARVFDVFLVEGYKVLYRVALAILKFFHKVRAGQPLESDSVKQDIRTFVRDIAKTVSPEKLLEKAFAIRLFSRKEIQLLQMANEKALKQKGITVKQKSVSLSKRQFVHLAVHAENFRSEIVSVREMRDIWSWVPERFALCQPLLLFSSLQHGYSLARFYFQCEGHEPTLLLIKTTQKEVCGAYLSTDWSERNKFGGKLGFFGTGECFVFRLQPEVQRYEWVVIKHPELTKP

SEQ ID NO: 3365 - protein, 56 aa, Homo sapiens
ILLGATCGLKTILTLTGVSTLGDVKNNQESDCVSKKKMVPDFYVDSIADLLPALQG

SEQ ID NO: 3366 - protein, 606 aa, Homo sapiens
ETLVSLRVHTVDDIQQIAAALAQCMGPSRELVCRSCLKQTLHKLEAMMLILQAETTAGTVTPTAIGDSILNITGDLIHLASSDVRAPQPSELGAESPSRMVASQAYNLTSALMRILMRSRVLNEEPLTLAGHYLSEEPEPYLAVYLHSEPRPNEHNCSASRRIRPESLQGADHRPYTFFISPGSRDPAGSYHLNLSSHFRWSALQVSVGLYTSLCQYFSEEDMVWRTEGLLPLEETSPRQAVCLTRHLTAFGASLFVPPSHVRFVFPEPTADVNYIVMLTCAVCLVTYMVMAAILHKLDQLDASRGRAIPFCGQRGRFKYEILVKTGWGRGSGTTAHVGIMLYGVDSRSGHRHLDGDRAFHRNSLDIFRIATPHSLGSVWKIRVWHDNKGLSPAWFLQHVIVRDLQTARSAFFLVNDWLSVETEANGGLVEKEVLAASDAALLRFRRLLVAELQRGFFDKHIWLSIWDRPPRSRFTRIQRATCCVLLICLFLGANAVWYGAVGDSAYSTGHVSRLSPLSVDTVAVGLVSSVVVYPVYLAILFLFRMSRSKVAGSPSPTPAGQQVLDIDSCLDSSVLDSSFLTFSGLHAEQAFVGQMKSDLFLDDSK

SEQ ID NO: 3367 - protein, 213 aa, Homo sapiens
MELCEFAFNMKKDEVCVNPYHYQRVETPVLPPVLVPRHTEIPAEFPPLDDYSHSIPENTNFPAGIEPQSNIPETPPPGYLSEDGETSDHQMNHSMDAGSPNLSPNPMSPAHNNLDLQPVTYCEPAFWCSISYYELNQRVGETFHASQPSMTVDGFTDPSNSERFCLGLLSNVNRNAAVELTRRHIGCNLKIFNNQEFAALLAQSVNQGFEAVY

SEQ ID NO: 3368 - protein, 120 aa, Homo sapiens
MTVLEQDTQGLDGWWLCSLHGRQGIVPGNRLKILVGMYDKKPAGPGPGPPATPAQPQPGLHAPAPPASQYTPMLPNTYQPQPDSVYLVPTPSKAQQGLYQVPGPSPQFQSPPAKQTSTFS

SEQ ID NO: 3369 - protein, 106 aa, Homo sapiens
MAESLRSPRRSLYKLVGSPPWKEAFRQRCLERMRNSRDRLLNRYRQAGSSGPGNSQNSFLVQEVMEEEWNALQSVENCPEDLAQLEELIDMAVLEEIQQELINQVF

SEQ ID NO: 3370 - protein, 811 aa, Homo sapiens
LFLLELLTCQKDFTNYFGHLEGCGADLHKEIRDTYYQLVLFLVKAVKGFSSLNDRSLLPALSCVQTALLHLLDMGWEPNDLAFFVDIQLPDLLMKMSQENISVHDSVISQWSEEDELADAKQNSEWMDECQDGMFEAWYEKIAQEDPEKQRKMHMFIARYCDLLNVDISCDGCDEIAPWHRYRCLQCSDMDLCKTCFLGGVKPEGHGDDHEMVNMEFTCDHCQGLIIGRRMNCNVCDDFDLCYGCYAAKKYSYGHLPTHSITAHPMVTIRISDRQRLIQPYIHNYSWLLFAALALYSAHLASAEDVDGEKLDPQTRSSATTLRSQCMQLVGDCLMKAHQGKGLKALALLGVLPDGDSSLEDQALPVTVPTGASEEQLEKKAVQGAELSEAGNGKRAVHEEIRPVDFKQRNKADKGVSLSKDPSCQTQISDSPADASPPTGLPDAEDSEVSSQKPIEEKAVTPSPEQVFAECSQKRILGLLAAMLPPLKSGPTVPLIDLEHVLPLMFQVVISNAGHLNETYHLTLGLLGQLIIRLLPAEVDAAVIKVLSAKHNLFAAGDSSIVPDGWKTTHLLFSLGAVCLDSRVGLDWACSMAEILRSLNSAPLWRDVIATFTDHCIKQLPFQLKHTNIFTLLVLVGFPQVLCVGTRCVYMDNANEPHNVIILKHFTEKNRAVIVDVKTRKRKTVKDYQLVQKGGGQECGDSRAQLSQYSQHFAFIASHLLQSSMDSHCPEAVEATWVLSLALKGLYKTLKAHGFEEIRATFLQTDLLKLLVKKCSKGTGFSKTWLLRDLEVRDERDSCSSFLVQMCWPRS

SEQ ID NO: 3371 - protein, 296 aa, Homo sapiens
MELALRRSPVPRWLLLLPLLLGLNAGAVIDWPTEEGKEVWDYVTVRKDAYMFWWLYYATNSCKNFSELPLVMWLQGGPGGSSTGFGNFEEIGPLDSDLKPRKTTWLQAASLLFVDNPVGTGFSYVNGSGAYAKDLAMVASDMMVLLKTFFSCHKEFQTVPFYIFSESYGGKMAAGIGLELYKAIQRGTIKCNFAGVALGDSWISPVDSVLSWGPYLYSMSLLEDKGLAEVSKVAEQVLNAVNKGLYREATELWGKAEMIIEQNTDGVNFYNILTKSTPTSTMESSLEFTQSHLVWF

SEQ ID NO: 3372 - protein, 160 aa, Homo sapiens
MAAALFVLLGFALLGTHGASGAEDLGSKILLTCSLNDSATEVTGHRWLKGGVVLKEDALPGQKTEFKVDSDDQWGEYSCVFLPEPMGTANIQLHGPPRVKAVKSSEHINEGETAMLVCKSESVPPVTDWAWYKITDSEDKALMNGSESRFFVSSSQGRSE

SEQ ID NO: 3373 - protein, 282 aa, Homo sapiens
MAAPRQIPSHIVRLKPSCSTDSSFTRTPVPTVSLASRELPVSSWQVTEPSSKNLWEQICKEYEAEQPPFPEGYKVKQEPVITVAPVEEMLFHGFSAEHYFPVSHFTMISRTPCPQDKSETINPKTCSPKEYLETFIFPVLLPGMASLLHQAKKEKCFERKRTKFIACDFLTEWLYNQNPKRAGEPFTEFFSIPFVEERLKQHPRPPIPLSLLLTEEEAALYIQSFWRACVVRCDPEIQELRQWQKKLREAKHIHQQVKIFWAKQEQKGKLLDSLSLVHSRKA

SEQ ID NO: 3374 - protein, 107 aa, Homo sapiens
MAESLRSPRRSLYKLVGSPPWKEAFRQRCLERMRNSRDRLLNRYRQAGSSGPGNSQNSFLVQEVMEEEWNALQSVENCPEDLAQLEELIDMAVLEEIQQELINQGTT

SEQ ID NO: 3375 - protein, 172 aa, Homo sapiens
MTATPESLFPTGDELDSSQLQMESDEVDTLKEGEDPADRMHPFLAIYELQSLKVHPLVFAPGVPVTAQVVGTERYTSGSKVGTCTLYSVRLTHGDFSWTTKKKYRHFQELHRDLLRHKVLMSLLPLARFAVAYSPARDAGNREMPSLPRAGPEGSTRHAASKQKYLENYLNR

SEQ ID NO: 3376 - protein, 252 aa, Homo sapiens
MTKEYQDLQHLDNEESDHHQLRKDSQLQEELRGLRETFSNFTASTEAQVKGLSTQGGNVGRKMKSLESQLEKQQKDLSEDHSSLLLHVKQFVSDLRSLSCQMAALQGNGSERTCCPVNWVEHERSCYWFSRSGKAWADADNYCRLEDAHLVVVTSWEEQKFVQHHIGPVNTWMGLHDQNGPWKWVDGTDYETGFKNWRPEQPDDWYGHGLGGGEDCAHFTDDGRWNDDVCQRPYRWVCETELDKASQEPPLL

SEQ ID NO: 3377 - protein, 190 aa, Homo sapiens
RPPRIPEPVHLPVVPDGRLSAASSAFSLASAGSAEGVGGAPTPKGQAAPPAPPLPSSLDPPPPPAAVEVFQRPPTLEELSPPPPAFLLFPQDEELPLPLDLPPPPPLDGDELGLPPPPPGFGPDEPSWVPASYLEKVVTLYPYTSQKDNELSFSEGTVICVTRRYSDGWCEGVSSEGTGFFPGNYVEPSC

SEQ ID NO: 3378 - protein, 42 aa, Homo sapiens
TIMNNIVIWNLKTGQLLKKMHIDDSYQASVCHKAYSEMVPGR

SEQ ID NO: 3379 - protein, 144 aa, Homo sapiens
QNPFPIENRDVLGETQDFHSLATYLSQNTSSVFLDTISDFHLLLFLVTNEVMPLQDSISLLLEAVRTRNEELAQTWKRSEQWATIEQLCTSRVAGITDVYHHTWRCHLYAQLAGSSQVSMSTAPSGAPHTRPLQPCGPVSTARS

SEQ ID NO: 3380 - protein, 70 aa, Homo sapiens
RHETIRVAVCDMMEGKCPCPEPLRGVMEKSFLEYYDFYEVACKDRLHLQGQTMQVIQPLLLIAEALQLAM

SEQ ID NO: 3381 - protein, 214 aa, Homo sapiens
MRRDVRILLLGEAQVGKTSLILSLVGEEFPEEVPPRAEEITIPADVTPEKVPTHIVDYSEAEQTDEELREEIHKANVVCVVYDVSEEATIEKIRTKWIPLVNGGTTQGPRVPIILVGNKSDLRSGSSMEAVLPIMSQFPEIETCVECSAKNLRNISELFYYAQKAVLHPTAPLYDPEAKQKSCFGHPLAPQALEDVKTVVCRNVAGGVREDRLT

SEQ ID NO: 3382 - protein, 922 aa, Homo sapiens
MTATPESLFPTGDELDSSQLQMESDEVDTLKEGEDPADRMHPFLAIYELQSLKVHPLVFAPGVPVTAQVVGTERYTSGSKVGTCTLYSVRLTHGDFSWTTKKKYRHFQELHRDLLRHKVLMSLLPLARFAVAYSPARDAGNREMPSLPRAGPEGSTRHAASKQKYLENYLNRLLTMSFYRNYHAMTEFLEVSQLSFIPDLGRKGLEGMIRKRSGGHRVPGLTCCGRDQVCYRWSKRWLVVKDSFLLYMCLETGAISFVQLFDPGFEVQVGKRSTEARHGVRIDTSHRSLILKCSSYRQARWWAQEITELAQGPGRDFLQLHRHDSYAPPRPGTLARWFVNGAGYFAAVADAILRAQEEIFITDWWLSPEVYLKRPAHSDDWRLDIMLKRKAEEGVRVSILLFKEVELALGINSGYSKRALMLLHPNIKVMRHPDQVTLWAHHEKLLVVDQVVAFLGGLDLAYGRWDDLHYRLTDLGDSSESAASQPPTPRPDSPATPDLSHNQFFWLGKDYSNLITKDWVQLDRPFEDFIDRETTPRMPWRDVGVVVHGLPARDLARHFIQRWNFTKTTKAKYKTPTYPYLLPKSTSTANQLPFTLPGGQCTTVQVLRSVDRWSAGTLENSILNAYLHTIRESQHFLYIENQFFISCSDGRTVLNKVGDEIVDRILKAHKQGWCYRVYVLLPLLPGFEGDISTGGGNSIQAILHFTYRTLCRGEYSILHRLKAAMGTAWRDYISICGLRTHGELGGHPVSELIYIHSKVLIADDRTVIIGSANINDRSLLGKRDSELAVLIEDTETEPSLMNGAEYQAGSVILGANTRPDLDLRDPICDDFFQLWQDMAESNANIYEQIFRCLPSNATRSLRTLREYVAVEPLATVSPPLARSELTQVQGHLVHFPLKFLEDESLLPPLGSKEGMIPLEVWT

SEQ ID NO: 3383 - protein, 147 aa, Homo sapiens
MELALRRSPVPRWLLLLPLLLGLNAGAVIDWPTEEGKEVWDYVTVRKDAYMFWWLYYATNSCKNFSELPLVMWLQGGPGGSSTGFGNFEEIGPFSEGPSSATLRGLPWVIPGSPLLIRCSPGDLTCTACLFSKTKVWQRCLRLQSKY

SEQ ID NO: 3384 - protein, 117 aa, Homo sapiens
MTKEYQDLQHLDNEESDHHQLRKGPPPPQPLLQRLCSGPRLLLLSLGLSLLLLVVVCVIGSQNSQLQEELRGLRETFSNFTASTEAQVKGLSTQGGNVGRKMKSLESQLEKQQKDLS

SEQ ID NO: 3385 - protein, 623 aa, Homo sapiens
MGLYRIRVSTGASLYAGSNNQVQLWLVGQHGEAALGKRLWPARGKGPGAGDEVRFPCYRWVEGNGVLSLPEGTGRTVGEDPQGLFQKHREEELEERRKLYRWGNWKDGLILNMAGAKLYDLPVDERFLEDKRVDFEVSLAKGLADLAIKDSLNVLTCWKDLDDFNRIFWCGQSKLAERVRDSWKEDALFGYQFLNGANPVVLRRSAHLPARLVFPPGMEELQAQLEKELEGGTLFEADFSLLDGIKANVILCSQQHLAAPLVMLKLQPDGKLLPMVIQLQLPRTGSPPPPLFLPTDPPMAWLLAKCWVRSSDFQLHELQSHLLRGHLMAEVIVVATMRCLPSIHPIFKLIIPHLRYTLEINVRARTGLVSDMGIFDQIMSTGGGGHVQLLKQAGAFLTYSSFCPPDDLADRGLLGVKSSFYAQDALRLWEIIYRYVEGIVSLHYKTDVAVKDDPELQTWCREITEIGLQGAQDRGFPVSLQARDQVCHFVTMCIFTCTGQHASVHLGQLDWYSWVPNAPCTMRLPPPTTKDATLETVMATLPNFHQASLQMSITWQLGRRQPVMVAVGQHEEEYFSGPEPKAVLKKFREELAALDKEIEIRNAKLDMPYEYLRPSVVENSVAI

SEQ ID NO: 3386 - protein, 52 aa, Homo sapiens
MPGEQQAEEEEEEEMQEEMVLLVKGEEDEGEEKYEVVKLKIPMDNKEEAECP

SEQ ID NO: 3387 - protein, 39 aa, Homo sapiens
NLGSAVKVLNSQSESSALTNQQPQNNGEVQNSKNQSVNK

SEQ ID NO: 3388 - protein, 159 aa, Homo sapiens
TGTLSRKSIKAPATPASATLGRPPRIPEPVHLPVVPDGRLSAASSAFSLASAGSAEGVGGAPTPKGQAAPPAPPLPSSLDPPPPPAAVEVFQRPPTLEELSPPPPAFLLFPQDEELPLPLDLPPPPPLDGDELGLPPPPPGFGPDEPSWVPASYLEKGT

SEQ ID NO: 3389 - protein, 413 aa, Homo sapiens
MSFRDLRNFTEMMRALGYPRHISMENFRTPNFGLVSEVLLWLVKRYEPQTDIPPDVDTEQDRVFFIKAIAQFMATKAHIKLNTKKLYQADGYAVKELLKITSVLYNAMKTKGMEGSEIVEEDVNKFKFDLGSKIADLKAARQLASEITSKGASLYDLLGMEVELREMRTEAIARPLEINETEKVMRIAIKEILTQVQKTKDLLNNVASDEANLEAKIEKRKLELERNRKRLETLQSVRPCFMDEYEKTEEELQKQYDTYLEKFQNLTYLEQQLEDHHRMEQERFEEAKNTLCLIQNKLKEEEKRLLKSGSNDDSDIDIQEDDESDSELEERRLPKPQTAMEMLMQGRPGKRIVGTMQGGDSDDNEDSEESEIDMEDDDDEDDDLEDESISLSPTKPNRRVRKSEPLDESDNDF

SEQ ID NO: 3390 - protein, 247 aa, Homo sapiens
MRTEAIARPLEINETEKVMRIAIKEILTQVQKTKDLLNNVASDEANLEAKIEKRKLELERNRKRLETLQSVRPCFMDEYEKTEEELQKQYDTYLEKFQNLTYLEQQLEDHHRMEQERFEEAKNTLCLIQNKLKEEEKRLLKSGSNDDSDIDIQEDDESDSELEERRLPKPQTAMEMLMQGRPGKRIVGTMQGGDSDDNEDSEESEIDMEDDDDEDDDLEDESISLSPTKPNRRVRKSEPLDESDNDF

SEQ ID NO: 3391 - protein, 447 aa, Homo sapiens
MTPQPAGPPDGGWGWVVAAAAFAINGLSYGLLRSLGLAFPDLAEHFDRSAQDTAWISALALAVQQAASPVGSALSTRWGARPVVMVGGVLASLGFVFSAFASDLLHLYLGLGLLAGFGWALVFAPALGTLSRYFSRRRVLAVGLALTGNGASSLLLAPALQLLLDTFGWRGALLLLGAITLHLTPCGALLLPLVLPGDPPAPPRSPLAALGLSLFTRRAFSIFALGTALVGGGYFVPYVHLAPHALDRGLGGYGAALVVAVAAMGDAGARLVCGWLADQGWVPLPRLLAVFGALTGLGLWVVGLVPVVGGEESWGGPLLAAAVAYGLSAGSYAPLVFGVLPGLVGVGGVVQATGLVMMLMSLGGLLGPPLSGFLRDETGDFTASFLLSGSLILSGSFIYIGLPRALPSCGPASPPATPPPETGELLPAPQAVLLSPGGPGSTLDTTC

SEQ ID NO: 3392 - protein, 72 aa, Homo sapiens
SIRLWTSPTFQWLIPDSADTTATPTHCAYDRIVVAGMLLRGAVVPDSALPFNFQAAYGLSDQLVCVLPCTAT

SEQ ID NO: 3393 - protein, 64 aa, Homo sapiens
TFQWLIPDSADTTATPTHCAYDRIVVAGMLLRGAVVPDSALPFNFQAAYGLSDQLVCVLPCTAT

SEQ ID NO: 3394 - protein, 176 aa, Homo sapiens
MELALRRSPVPRWLLLLPLLLGLNAGAVIDWPTEEGKEVWDYVTVRKDAYMFWWLYYATNSCKNFSELPLVMWLQLQAASLLFVDNPVGTGFSYVNGSGAYAKDLAMVASDMMVLLKTFFSCHKEFQTVPFYIFSESYGGKMAAGIGLELYKAIQRGTIKCNFAGVALGDSWISPV

SEQ ID NO: 3395 - protein, 95 aa, Homo sapiens
MVASDMMVLLKTFFSCHKEFQTVPFYIFSESYGGKMAAGIGLELYKAIQRGTIKCNFAGVALGDSWISPVDSVLSWGPYLYSMSLLEDKGLAEVS

SEQ ID NO: 3396 - protein, 157 aa, Homo sapiens
MVTLHRMGPNLQLIEGDAKQLAGMITFTCNLAENVSSKVRQLDLAKNRLYQAIQRADDILDLKFCMDGVQTALRSEDYEQAAAHTHRYLCLDKSVIELSRQGKEGSMIDANLKLLQEAEQRLKAIVAEKFAIATKEGDLPQVERFFKIFPLLGLHEE

SEQ ID NO: 3397 - protein, 158 aa, Homo sapiens
MTMFENVTRALARQLNPRGDLTPLDSLIDFKRFHPFCLVLRKRKSTLFWGARYVRTDYTLLDVLEPGSSPSDPTDTGNFGFKNMLDTRVEGDVDVPKTVKVKGTAGLSQNSTLEVQTLSVAPKALETVQERKLAADHPFLKEMQDQGENLYVVMEVVE

SEQ ID NO: 3398 - protein, 2639 aa, Homo sapiens
MDGRDFAPPPHLLSERGSLGHRSAAAAARLAPAGPAAQPPAHFQPGKYFPSPLPMASHTASSRLMGSSPASSFMGSFLTSSLGSAASTHPSGPSSSPPEQAYRGSHPTTSQIWFSHSHEAPGYPRFSGSLASTFLPVSHLDHHGNSNVLYGQHRFYGTQKDNFYLRNLPPQPTLLPANHNFPSVARAAPAHPMGSCSRDRDRGEAGSLQKGPKDFDRFLVGKELGREKAGKAAEGKERPAAEEDGGKERHKLVLPVPADGHCREGGPAPRGACEGRPKHLTSCLLNTKVLNGEMGRAALASCAGGMLGRPGTGVVTSGRCAKEAAGPPEPGPAFSECLERRQMLHHTASYAGPPPPLSTAAGSFPCLQLHGGPDGLCPLQDKAPRDLKASGPTFVPSVGHLADKGRPFQAAEACAVAGEGKDRHLEGTMAPDHAAPYGVSYAHLKAEGKGERRPGGFEAALNPRLKGLDYLSSAGPEASFPGLPKSGLDKSGYFELPTSSQDCARPGHQDPLGGKAPQACCTLDKTVGKEAPAGPPGAQKVARIRHQQHLMAAEVEQGGIGAEAKRKSLELASLGYSGPHLPPWGVQAGQGTAMAISEERKAGAYLDPFGSGLQQAALLPQELPAPPDEVSAMKNLLKYSSQALVVGQKAPLVGLGGLKASCIQQEAKFLSSKGPGQSERPDCARSREHDTTHGDGEVRQPPVGIAVALARQKDTVSRSEAAYGTNTARQGRAAPAFKGGGGPRSTHALDLEAEEERTRLCDDRLGLASRELLLQDSKDRVEFARIHPPSSCPGDLAPHLMMQSGQLGGDPAPHTHPHPPWLPRTRSPSLWMGGHSYGLGHPALHQNLPPGFPASVAGPVPSVFPLPQDAPTQLVILPSEPTPHSAPHALADVMDQASLWPPMYGGRGPASHMQHPGQLPVYSRPQLLRQQELYALQQQRAAQFQRKPEDQHLDLEEPAQEKAPKSTHKPVALTPTAPGAPSPAAGPTKLPPCCHPPDPKPPASSPTPPPRPSAPCTLNVCPASSPGPGSRVRSAEEKNGEGQQSTADIITSEPVARAHSVAHAGLEFLASNDPSTSASQSFGITDLPPGYLRPMAGLGFSLPSDVHSSNLEDPETMQTTAPGAQPEPTRTFLPGEPPPCSPRSLEEPGLLSGAREATQDLAATPYPTERGPQGKAADPSPLEGLQELQCAALLEAGGPEATGQAHSTQGGAREERSREEGEQGPSSGASSQVLEQRAGSPGALEDEGEQPAPEEDELEEDELGQQSMEDSEEDCGGAPDNSHPPRALPGLDALVAATINLGDLPSDSPPDPQPPAASGPPSTVPLPHSSGIHGIALLSELADLAIQRQRSERTVPEEEEDVLAFNLQHLATLATAWSLVEAAGLDSSTAPAQPPTANPCSGPRLTPRMQILQRKDTWTPKTKPVCPLKAAIDRLDTQEVGMRVRLAELQRRYKEKQRELARLQRKHDHERDESSRSPARRGPGRPRKRKHSSSLPAPRPTGPLPRSDGKKVKAVRTSLGLLCAELRGGSGGEPAKKRSKLERSVYAGLQTASVEKAQCKKSSCQGGLAPSVAHRVAQLKPKVKSKGLPTGLSSFQQKEATPGGRIREKLSRAKSAKVSGATRHPQPKGHGSRETPRCPAQPSVAASQEAGSGYDSEDCEGLLGTEAPPREAGLLLHTGASVAVLGPSPSSVVKMEANQKAKKKKERQGLLGACRLSSPESEVKIKRRSVKAKVGTTLERAPGQRPPGALGKKKAKGKAKGSLRAEPGATPSRDALFNPSRAFACREEGSQLASERLKRATRKGTVLQPVLRRKNGALSITLATRNAKAILGKGRKLSKVKHKAGKQGKGRAVSRLLESFAVEEDFEFDDNSSFSEEEEDEEEEEEDSGPLSAEQSAALARSCAIHKEDLRDGLPVLIPKEDSLLYAGSVRTLQPPDIYSIVIEGERGNRQRIYSLEQLLQEAVLDVRPQSSRYLPPGTRVCAYWSQKSRCLYPGNVVRGASGDEDEDLDSVVVEFDDGDTGHIAVSNVRLLPPDFKIQCTEPSPALLVSSSCRRTKKVSSEAPPPSEAATPSLSPKAQDGPEALKTPGKKSISKDKAGKAELLTSGAKSPTGASDHFLGRRGSPLLSWSAVAQTKRKAVAAASKGPGVLQNLFQLNGSSKKLRAREALFPVHSVATPIFGNGFRADSFSSLASSYAPFVGGTGPGLPRGAHKLLRAKKAERVEAEKGGRRRAGGEFLVKLDHEGVTSPKNKTCKALLMGDKDFSPKLGRPLPSPSYVHPALVGKDKKGRAPIPPLPMGLALRKYAGQAEFPLPYDSDCHSSFSDEDEDGPGLAAGVPSRFLARLSVSSSSSGSSTSSSSGSVSTSSLCSSDNEDSSYSSDDEDPALLLQTCLTHPVPTLLAQPEALRSKGSGPHAHAQRCFLSRATVAGTGAGSGPSSSSKSKLKRKEALSFSKAKELSRRQRPPSVENRPKISAFLPARQLWKWSGNPTQRRGMKGKARKLFYKAIVRGEETLRVGDCAVFLSAGRPNLPYIGRIESMWESWGSNMVVKVKWFYHPEETKLGKRQCDGKNALYQSCHEDENDVQTISHKCQVVAREQYEQMARSRKCQDRQDLYYLAGTYDPTTGRLVTADGVPILC

SEQ ID NO: 3399 - protein, 353 aa, Homo sapiens
MKCYDPVGKTPGSLGSSASAGQAAASAPLPLESGELSRGDLSRPEDADTSGPCCEHTQEKQSTRAPAAAPFVPFSGGGQRLGGPPGPTRPLTSSSAKLPKSLSSPGGPSKPKKSKSGQDPQQEQEQERERDPQQEQERERPVDREPVDREPVVCHPDLEERLQAWPAELPDEFFELTVDDVRRRLAQLKSERKRLEEAPLVTKAFREAQIKEKLERYPKVALRVLFPDRYVLQGFFRPSETVGDLRDFVRSHLGNPELSFYLFITPPKTVLDDHTQTLFQANLFPAALVHLGAEEPAGVYLEPGLLEHAISPSAADVLVARYMSRAAGSPSPLPAPDPAPKSEPAAEEGALVP

SEQ ID NO: 3400 - protein, 314 aa, Homo sapiens
MDEGGCSQAAPAFAEGAGLGSGAPALSGSCLLTSGRCRCHRHRTALSIHPPLARPLFWSQFLLHHSHEADSLQKEEARLPQTKEEAALLSQEFAEAWGQKAKELYEPIWQNFTDPQLRRIIGAVRTLGSANLPLAKRQQYNALLSNMSRIYSTAKVCLPNKTATCWSLDPDLTNILASSRSYAMLLFAWEGWHNAAGIPLKPLYEDFTALSNEAYKQDGFTDTGAYWRSWYNSPTFEDDLEHLYQQLEPLYLNLHAFVRRALHRRYGDRYINLRGPIPAHLLGDMWAQSWENIYDMVVPFPDKPNLDVTSTMLQ

SEQ ID NO: 3401 - protein, 340 aa, Homo sapiens
GMPPGIPPLMPGVPPLMPGMPPVMPGMPPGLHHQRKYTQSFCGENIMMPMGGMMPPGPGIPPLMPGMPPGMPPPVPRPGIPPMTQAQAVSAPGILNRPPAPTATVPAPQPPVTKPLFPSAGQMGTPVTSSSTASSNSESLSASSKALFPSTAQAQAAVQGPVGTDFKPLNSTPATTTEPPKPTFPAYTQSTASTTSTTNSTAAKPAASITSKPATLTTTSATSKLIHPDEDISLEERRAQLPKYQRNLPRPGQAPIGNPPVGPIGGMMPPQPGIPQQQGMRPPMPPHGQYGGHHQGMPGYLPGAMPPYGQGPPMVPPYQGGPPRPPMGMRPPVMSQGGRY

SEQ ID NO: 3402 - protein, 305 aa, Homo sapiens
MPLLTLYLLLFWLSGYSIVTQITGPTTVNGLERGSLTVQCVYRSGWETYLKWWCRGAIWRDCKILVKTSGSEQEVKRDRVSIKDNQKNRTFTVTMEDLMKTDADTYWCGIEKTGNDLGVTVQVTIDPASTPAPTTPTSTTFTAPVTQEETSSSPTLTGHHLDNRHKLLKLSVLLPLIFTILLLLLVAASLLAWRMMKYQQKAAGMSPEQVLQPLEGDLCYADLTLQLAGTSPQKATTKLSSAQVDQVEVEYVTMASLPKEDISYASLTLGAEDQEPTYCNMGHLSSHLPGRGPEEPTEYSTISRP

SEQ ID NO: 3403 - protein, 2482 aa, Homo sapiens
MKGTDSGSCCRRRCDFGCCCRASRRAHYTPYRSGDATRTPQSPRQTPSRERRRPEPAGSWAAAAEEEEAAAAATPWMRDYFAEDDGEMVPRTSHTAAFLSDTKDRGPPVQSQIWRSGEKVPFVQTYSLRAFEKPPQVQTQALRDFEKHLNDLKKENFSLKLRIYFLEERMQQKYEASREDIYKRNIELKVEVESLKRELQDKKQHLDKTWADVENLNSQNEAELRRQFEERQQETEHVYELLENKIQLLQEESRLAKNEAARMAALVEAEKECNLELSEKLKGVTKNWEDVPGDQVKPDQYTEALAQRDKRIEELNQSLAAQERLVEQLSREKQQLLHLLEEPTSMEVQPMTEELLKQQKLNSHETTITQQSVSDSHLAELQEKIQQTEATNKILQEKLNEMSYELKCAQESSQKQDGTIQNLKETLKSRERETEELYQVIEGQNDTMAKLREMLHQSQLGQLHSSEGTSPAQQQVALLDLQSALFCSQLEIQKLQRVVRQKERQLADAKQCVQFVEAAAHESEQQKEASWKHNQELRKALQQLQEELQNKSQQLRAWEAEKYNEIRTQEQNIQHLNHSLSHKEQLLQEFRELLQYRDNSDKTLEANEMLLEKLRQRIHDKAVALERAIDEKFSALEEKEKELRQLRLAVRERDHDLERLRDVLSSNEATMQSMESLLRAKGLEVEQLSTTCQNLQWLKEEMETKFSRWQKEQESIIQQLQTSLHDRNKEVEDLSATLLCKLGPGQSEIAEELCQRLQRKERMLQDLLSDRNKQVLEHEMEIQGLLQSVSTREQESQAAAEKLVQALMERNSELQALRQYLGGRDSLMSQAPISNQQAEVTPTGRLGKQTDQGSMQIPSRDDSTSLTAKEDVSIPRSTLGDLDTVAGLEKELSNAKEELELMAKKERESQMELSALQSMMAVQEEELQVQAADMESLTRNIQIKEDLIKDLQMQLVDPEDIPAMERLTQEVLLLREKVASVESQGQEISGNRRQQLLLMLEGLVDERSRLNEALQAERQLYSSLVKFHAHPESSERDRTLQVELEGAQVLRSRLEEVLGRSLERLNRLETLAAIGGAAAGDDTEDTSTEFTDSIEEEAAHHSHQQLVKVALEKSLATVETQNPSFSPPSPMGGDSNRCLQEEMLHLRAEFHQHLEEKRKAEEELKELKAQIEEAGFSSVSHIRNTMLSLCLENAELKEQMGEAMSDGWEIEEDKEKGEVMVETVVTKEGLSESSLQAEFRKLQGKLKNAHNIINLLKEQLVLSSKEGNSKLTPELLVHLTSTIERINTELVGSPGKHQHQEEGNVTVRPFPRPQSLDLGATFTVDAHQLDNQSQPRDPGPQSAFSLPGSTQHLRSQLSQCKQRYQDLQEKLLLSEATVFAQANELEKYRVMLSESLVKQDSKQIQVDLQDLGYETCGRSENEAEREETTSPECEEHNSLKEMVLMEGLCSEQGRRGSTLASSSERKPLENQLGKQEEFRVYGKSENILVLRKDIKDLKAQLQNANKVIQNLKSRVRSLSVTSDYSSSLERPRKLRAVGTLEGSSPHSVPDEDEGWLSDGTGAFYSPGLQAKKDLESLIQRVSQLEAQLPKNGLEEKLAEELRSASWPGKYDSLIQDQARELSYLRQKIREGRGICYLITRHAKDTVKSFEDLLRSNDIDYYLGQSFREQLAQGSQLTERLTSKLSTKDHKSEKDQAGLEPLALRLSRELQEKEKVIEVLQAKLDARSLTPSSSHALSDSHRSPSSTSFLSDELEACSDMDIVSEYTHYEEKKASPSHSDSIHHSSHSAVLSSKPSSTSASQGAKAESNSNPISLPTPQNTPKEANQAHSGFHFHSIPKLASLPQAPLPSAPSSFLPFSPTGPLLLGCCETPVVSLAEAQQELQMLQKQLGESASTVPPASTATLLSNDLEADSSYYLNSAQPHSPPRGTIELGRILEPGYLGSSGKWDVMRPQKGSVSGDLSSGSSVYQLNSKPTGADLLEEHLGEIRNLRQRLEESICINDRLREQLEHRLTSTARGRGSTSNFYSQGLESIPQLCNENRVLREDNRRLQAQLSHVSREHSQETESLREALLSSRSHLQELEKELEHQKVERQQLLEDLREKQQEVLHFREERLSLQENDSRLQHKLVLLQQQCEEKQQLFESLQSELQIYEALYGNSKKGLKAYSLDACHQIPLSSDLSHLVAEVRALRGQLEQSIQGNNCLRLQLQQQLESGAGKASLSPSSINQNFPASTDPGNKQLLLQDSAVSPPVRDVGMNSPALVFPSSASSTPGSETPIINRANGLGLDTSPVMKTPPKLEGDATDGSFANKHGRHVIGHIDDYSALRQQIAEGKLLVKKIVSLVRSACSFPGLEAQGTEVLGSKGIHELRSSTSALHHALEESASLLTMFWRAALPSTHIPVLPGKVGESTERELLELRTKVSKQERLLQSTTEHLKNANQQKESMEQFIVSQLTRTHDVLKKARTNLEVKSLRALPCTPAL

SEQ ID NO: 3404 - protein, 501 aa, Homo sapiens
MVPASRSREGPENMVRIALQLDDGSRLQDSFCSGQTLWELLSHFPQIRECLQHPGGATPVCVYTRDEVTGEAALRGTTLQSLGLTGGSATIRFVMKCYDPVGKTPGSLGSSASAGQAAASAPLPLESGELSRGDLSRPEDADTSGPCCEHTQEKQSTRAPAAAPFVPFSGGGQRLGGPPGPTRPLTSSSAKLPKSLSSPGGPSKPKKSKSGQDPQQEQEQERERDPQQEQERERPVDREPVDREPVVCHPDLEERLQAWPAELPDEFFELTVDDVRRRLAQLKSERKRLEEAPLVTKAFREAQIKEKLERYPKVALRVLFPDRYVLQGFFRPSETVGDLRDFVRSHLGNPELSFYLCLSSFGRMDGRGPRCFLTRRCLLSSVITPPKTVLDDHTQTLFQANLFPAALVHLGAEEPAGVYLEPGLLEHAISPSAADVLVARYMSRAAGSPSPLPAPDPAPKSEPAAEEGALVPPEPIPGTAQPVKRSLGKVPKWLKLPASKR

SEQ ID NO: 3405 - protein, 354 aa, Homo sapiens
MSNSVPLLCFWSLCYCFAAGSPVPFGPEGRLEDKLHKPKATQTEVKPSVRFNLRTSKDPEHEGCYLSVGHSQPLEDCSFNMTAKTFFIIHGWTMSGIFENWLHKLVSALHTREKDANVVVVDWLPLAHQLYTDAVNNTRVVGHSIARMLDWLQEKDDFSLGNVHLIGYSLGAHVAGYAGNFVKGTVGRITGLDPAGPMFEGADIHKRLSPDDADFVDVLHTYTRSFGLSIGIQMPVGHIDIYPNGGDFQPGCGLNDVLGSIAYGTITEVVKCEHERAVHLFVDSLVNQDKPSFAFQCTDSNRFKKGICLSCRKNRCNSIGYNAKKMRNKRNSKMYLKTRAGMPFRGNLQSLECP

SEQ ID NO: 3406 - protein, 742 aa, Homo sapiens
MAGERGASAVLFDITEDRAAAEQLQQPLGLTWPVVLIWGNDAEKLMEFVYKNQKAHVRIELKEPPAWPDYDVWILMTVVGTIFVIILASVLRIRCRPRHSRPDPLQQRTAWAISQLATRRYQASCRQARGEWPDSGSSCSSAPVCAICLEEFSEGQELRVISCLHEFHRNCVDPWLHQHRTCPLCMFNITEGDSFSQSLGPSRSYQEPGRRLHLIRQHPGHAHYHLPAAYLLGPSRSAVARPPRPGPFLPSQEPGMGPRHHRFPRAAHPRAPGEQQRLAGAQHPYAQGWGLSHLQSTSQHPAACPVPLRRARPPDSSGSGESYCTERSGYLADGPASDSSSGPCHGSSSDSVVNCTDISLQGVHGSSSTFCSSLSSDFDPLVYCSPKGDPQRVDMQPSVTSRPRSLDSVVPTGETQVSSHVHYHRHRHHHYKKRFQWHGRKPGPETGVPQSRPPIPRTQPQPEPPSPDQQVTRSNSAAPSGRLSNPQCPRALPEPAPGPVDASSICPSTSSLFNLQKSSLSARHPQRKRRGGPSEPTPGSRPQDATVHPACQIFPHYTPSVAYPWSPEAHPLICGPPGLDKRLLPETPGPCYSNSQPVWLCLTPRQPLEPHPPGEGPSEWSSDTAEGRPCPYPHCQVLSAQPGEFSEGSGCGRERRLQLNISGQVKSANKGLMEAEKDTAEMTTKILNHRDSVSCWLECRNTPPLPGATPLVGRSQGGPREVLVWLRHQKGTWKAGCDGSCL

SEQ ID NO: 3407 - protein, 181 aa, Homo sapiens
MTWPVQAVRWEKIQPRQIDLLTYCNLVHGRNFTSKFPRQIVSNCSHGRWSVIVIPDVTVSDSGLYRCYLQASAGENETFVMRLTVAEGKTDNQYTLFVAGGTVLLLLFVISITTIIVIFLNRRRRRERRDLFTESWDTQKAPNNYRSPISTSQPTNQSMDDTREDIYVNYPTFSRRPKTRV

SEQ ID NO: 3408 - protein, 188 aa, Homo sapiens
LCYCFAAGSPVPFGPEGRLEDKLHKPKATQTEVKPSVRFNLRTSKDPEHEGCYLSVGHSQPLEDCSFNMTAKTFFIIHGWTMSGIFENWLHKLVSALHTREKDANVVVVDWLPLAHQLYTDAVNNTRVVGHSIARMLDWLQVLGDERESPVTSRISNPIFLRNAGHASVAMNFWSLIKIFEIKSFIEL

SEQ ID NO: 3409 - protein, 742 aa, Homo sapiens
MSGGHQLQLAALWPWLLMATLQAGFGRTGLVLAAAVESERSAEQKAIIRVIPLKMDPTGKLNLTLEGVFAGVAEITPAEGKLMQARMAGERGASAVLFDITEDRAAAEQLQQPLGLTWPVVLIWGNDAEKLMEFVYKNQKAHVRIELKEPPAWPDYDVWILMTVVGTIFVIILASVLRIRCRPRHSRPDPLQQRTAWAISQLATRRYQASCRQARGEWPDSGSSCSSAPVCAICLEEFSEGQELRVISCLHEFHRNCVDPWLHQHRTCPLCMFNITEGDSFSQSLGPSRSYQEPGRRLHLIRQHPGHAHYHLPAAYLLGPSRSAVARPPRPGPFLPSQEPGMGPRHHRFPRAAHPRAPGEQQRLAGAQHPYAQGWGLSHLQSTSQHPAACPVPLRRARPPDSSGSGESYCTERSGYLADGPASDSSSGPCHGSSSDSVVNCTDISLQGVHGSSSTFCSSLSSDFDPLVYCSPKGDPQRVDMQPSVTSRPRSLDSVVPTGETQVSSHVHYHRHRHHHYKKRFQWHGRKPGPETGVPQSRPPIPRTQPQPEPPSPDQQVTRSNSAAPSGRLSNPQCPRALPEPAPGPVDASSICPSTSSLFNLQKSSLSARHPQRKRRGGPSEPTPGSRPQDATVHPACQIFPHYTPSVAYPWSPEAHPLICGPPGLDKRLLPETPGPCYSNSQPVWLCLTPRQPLEPHPPGEGPSEWSSDTAEGRPCPYPHCQVLSAQPGSEEELEELCEQAV

SEQ ID NO: 3410 - protein, 516 aa, Homo sapiens
MDLVGVASPEPGTAAAWGPSKCPWAIPQNTISCSLADVMSEQLAKELQLEEEAAVFPEVAVAEGPFITGENIDTSSDLMLAQMLQMEYDREYDAQLRREEKKFNGDSKVSISFENYRKVHPYEDSDSSEDEVDWQDTRDDPYRPAKPVPTPKKGFIGKGKDITTKHDEVVCGRKNTARMENFAPEFQVGDGIGMDLKLSNHVFNALKQHAYSEERRSARLHEKKEHSTAEKAVDPKTRLLMYKMVNSGMLETITGCISTGKESVVFHAYGGSMEDEKEDSKVIPTECAIKVFKTTLNEFKNRDKYIKDDFRFKDRFSKLNPRKIIRMWAEKEMHNLARMQRAGIPCPTVVLLKKHILVMSFIGHDQVPAPKLKEVKLNSEEMKEAYYQTLHLMRQLYHECTLVHADLSEYNMLWHAGKVWLIDVSQSVEPTHPHGLEFLFRDCRNVSQKGGVKEALSERELFNAVSGLNITADNEADFLAEIEALEKMNEDHVQKNGRKAASFLKDDGDPPLLYDE

SEQ ID NO: 3411 - protein, 388 aa, Homo sapiens
MAWGLEAQDDPPAERTKNVCKDVETNIDSESTLIQGISEERDGMMSHGQLKSVPQRTDFPETRNVEKHQDIPTVKNIQGKVPRIPCARKPFICEECGKSFSYFSYYARHQRIHTGEKPFECSECGKAFNGNSSLIRHQRIHTGERPYQCEECGRAFNDNANLIRHQRIHSGDRPYYCTECGNSFTSSSEFVIHQRIHTGEKPYECNECGKAFVGNSPLLRHQKIHTGEKPYECNECGKSFGRTSHLSQHQRIHTGEKPYSCKVCGQAFNFHTKLTRHQRIHSEEKPFDCVDCGKAFSAQEQLKRHLRIHTQESSYVCDECGKALTSKRNLHQHQRIHTGEKPYECSKYEKAFGTSSQLGHLEHVYSGEKPVLDICRFGLPEFFTPFYW

SEQ ID NO: 3412 - protein, 247 aa, Homo sapiens
MSGLGRSRRGGRSRVDQEERWSLSCRKEQGKFYDHLLRDCISCASICGQHPKQCAYFCENKLRSPVNLPPELRRQRSGEVENNSDNSGRYQGLEHRGSEASPALPGLKLSADQVALVYSTLGLCLCAVLCCFLVAVACFLKKRGDPCSCQPRSRPRQSPAKSSQDHAMEAGSPVSTSPEPVETCSFCFPECRAPTQESAVTPGTPDPTCAGRWGCHTRTTVLQPCPHIPDSGLGIVCVPAQEGGPGA

SEQ ID NO: 3413 - protein, 168 aa, Homo sapiens
MGAASGRRGPGLLLPLPLLLLLPPQPALALDPGLQPGNFSADEAGAQLFAQSYNSSAEQVLFQSVAASWAHDTNITAENARRQEEAALLSQEFAEAWGQKAKELYEPIWQNFTDPQLRRIIGAVRTLGSANLPLAKRQQISPTSWLPREATPCSCLPGRAGTTLRASR

SEQ ID NO: 3414 - protein, 1224 aa, Homo sapiens
MVGVLAMAAAAAPPPVKDCEIEPCKKRKKDDDTSTCKTITKYLSPLGKTRDRVFAPPKPSNILDYFRKTSPTNEKTQLGKECKIKSPESVPVDSNKDCTTPLEMFSNVEFKKKRKRVNLSHQLNNIKTENEAPIEISSDDSKEDYSLNNDFVESSTSVLRYKKQVEVLAENIQDTKSQPNTMTSLQNSKKVNPKQGTTKNDFKKLRKRKCRDVVDLSESLPLAEELNLLKKDGKDTKQMENTTSHANSRDNVTEAAQLNDSIITVSYEEFLKSHKENKVEEIPDSTMSICVPSETVDEIVKSGYISESENSEISQQVRFKTVTVLAQVHPIPPKKTGKIPRIFLKQKQFEMENSLSDPENEQTVQKRKSNVVIQEEELELAVLEAGSSEAVKPKCTLEERQQFMKAFRQPASDALKNGVKKSSDKQKDLNEKCLYEVGRDDNSKKIMENSGIQMVSKNGNLQLHTDKGSFLKEKNKKLKKKNKKTLDTGAIPGKNREGNTQKKETTFFLKEKQYQNRMSLRQRKTEFFKSSTLFNNESLVYEDIANDDLLKVSSLCNNNKLSRKTSIPVKDIKLTQSKAESEASLLNVSTPKSTRRSGRISSTPTTETIRGIDSDDVQDNSQLKASTQKAANLSEKHSLYTAELITVPFDSESPIRMKFTRISTPKKSKKKSNKRSEKSEATDGGFTSQIRKASNTSKNISKAKQLIEKAKALHISRSKVTEEIAIPLRRSSRHQTLPERKKLSETEDSVIIIDSSPTALKHPEKNQKKLQCLNDVLGKKLNTSTKNVPGKMKVAPLFLVRKAQKAADPVPSFDESSQDTSEKSQDCDVQCKAKRDFLMSGLPDLLKRQIAKKAAALDVYNAVSTSFQRVVHVQQKDDGCCLWHLKPPSCPLLTKFKELNTKVIDLSKCGIALGEFSTLNSKLKSGNSAAVFMRTRKEFTEEVRNLLLEEIRWSNPEFSLKKYFPLLLKKQIEHQVLSSECHSKQELEADVSHKETKRKLVEAENSKSKRKKPNEYSKNLEKTNRKSEELSKRNNSSGIKLDSSKDSGTEDMLWTEKYQPQTASELIGNELAIKKLHSWLKDWKRRAELEERQNLKGKRDEKHEDFSGGIDFKGSSDDEEESRLCNTVLITGPTGVGKTAAVYACAQELGFKIFEVNASSQRSGRQILSQLKEATQSHQVDKQGVNSQKPCFFNSYYIGKSPKKISSPKKVVTSPRKVPPPSPK

SEQ ID NO: 3415 - protein, 227 aa, Homo sapiens
ESPKSLYSRESVYDLLPKELQLPPSRETSVASMSQTSGGEAGSPPPAVVAADASSAPSSSSMGGACSSFTTSSSPTIYSTSVTDSKAMQVESCSSAVGNNMPGIQGATSSPQPQATLFHNTAGGTMNQLQNSPGSSQQTSGMFLFGIQNNCSQLLTSGPATLPDQLMAISQPGQPQNEGQPPVTTLLSQQMPENSPLASSINTNQNIEKIDLLVSLQNQGNNLTGSF

SEQ ID NO: 3416 - protein, 370 aa, Homo sapiens
MNVAAKYRMASLYVGDLHADVTEDLLFRKFSTVGPVLSIRICRDQVTRRSLGYAYVNFLQLADAQKALDTMNFDIIKGKSIRLMWSQRDAYLRRSGIGNVFIKNLDKSIDNKTLYEHFSAFGKILSSKVMSDDQGSKGYAFVHFQNQSAADRAIEEMNGKLLKGCKVFVGRFKNRKDREAELRSKASEFTNVYIKNFGGDMDDERLKDVFSKYGKTLSVKVMTDSSGKSKGFGFVSFDSHEAAKKAVEEMNGRDINGQLIFVGRAQKKVERQAELKQMFEQLKRERIRGCQGVKLYIKNLDDTIDDEKLRNEFSSFGSISRVKVMQEEGQSKGFGLICFSSPEDATKAMTEMNGRILGSKPLSIALAQRH

SEQ ID NO: 3417 - protein, 1815 aa, Homo sapiens
MMDSENKPENDEDEKINKEAQDLTKLSSHNEDGGPVSDVIASFPENSMGKRGFSESSNSDSVVIGEDRNKHASKRRKLDEAEPLKSGKQGICRLETSESSVTEGGIALDETGKETFLSDCTVGGTCLPNALSPSCNFSTIDVVSLKTDTEKTSAQEMVSLDLERESPFPPKEISVSCTIGNVDTVLKCSICGHLFSSCSDLEKHAESHMQQPKEHTCCHCSHKAESSSALHMHIKQAHGPQKVFSCDLCGFQCSEENLLNAHYLGKTHLRRQNLAARGGFVQILTKQPFPKKSRTMATKNVHSKPRTSKSIAKNSDSKGLRNVGSTFKDFRGSISKQSGSSSELLVEMMPSRNTLSQEVEIVEEHVTSLGLAQNPENQSRKLDTLVTSEGLLEKLESTKNTLQAAHGNSVTSRPRPERNILVLGNSFRRRSSTFTLKGQAKKRFNLLGIKRGTSETQRMYMKHLRTQMKTHDAESVLKHLEACSSVQRVCVTTSETQEAEQGQGSARPPDSGLHSLTVKPASGSQTLCACTDCGQVATNRTDLEIHVKRCHAREMKFYCRTCDFSSMSRRDLDEHLHSNQHQQTASVLSCQCCSFISLDEINLRDHMKEKHNMHFLCTPCNLFFLSEKDVEEHKATEKHINSLVQPKTLQSSNSDLVLQTLPLSTLESENAKESMDDSGKASQEEPLKSRVSHGNEVRHSSKPQFQCKKCFYKTRSSTVLTRHIKLRHGQDYHFLCKACNLYSLSKEGMEKHIKRSKHLENAKKNNIGLSFEECIERVCIGANDKKEEFDVSGNGRIEGHIGVQLQEHSYLEKGMLASEELSQSGGSTKDDELASTTTPKRGRPKGNISRTCSHCGLLASSITNLTVHIRRKHSHQYSYLCKVCKYYTVTKGDMERHCATKKHKGRVEIEASGKHSSDIIVGPEGGSLEAGKKNAGSAVTMSDEHANKPAESPTSVLEKPDRGNSIEAEVENVFHSLDGEVNSHLLDKKEQISSEPEDFAQPGDVYSQRDVTGTGENKCLHCEFSAHSSASLELHVKRKHTKEFEFYCMACDYYAVTRREMTRHAATEKHKMKRQSYLNSANVEAGSADMSKNIIMPEEEHQQNSEEFQIISGQPSDTLKSRNAADCSILNENTNLDMSKVLCAADSVEVETEEESNFNEDHSFCETFQQAPVKDKVRKPEEMMSLTMSSNYGSPSRFQNENSGSSALNCETAKKNHEISNDAGELRVHCEGEGGNAGDGGGVVPHRHLCPVTLDGERSAESPVLVVTRITREQGNLESGGQNRVARGHGLEDLKGVQEDPVLGNKEILMNSQHETEFILEEDGPASDSTVESSDVYETIISIDDKGQAMYSFGRFDSSIIRIKNPEDGELIDQSEEGLIATGVRISELPLKDCAQGVKKKKSEGSSIGESTRIRCDDCGFLADGLSGLNVHIAMKHPTKEKHFHCLLCGKSFYTESNLHQHLASAGHMRNEQASVEELPEGGATFKCVKCTEPFDSEQNLFLHIKGQHEELLREVNKYIVEDTEQINREREENQGNVCKYCGKMCRSSNSMAFLAHIRTHTGSKPFKCKICHFATAQLGDARNHVKRHLGMREYKCHVCGVAFVMKKHLNTHLLGKHGVGTPKERKFTCHLCDRSFTEKWALNNHMKLHTGEKPFKCTWPTCHYSFLTASAMKDHYRTHTGEKSFLCDLCGFAGGTRHALTKHRRQHTGEKPFKCDECNFASTTQSHLTRHKRVHTGEKPYRCPWCDYRSNCAENIRKHILHTGKHEGVKMYNCPKCDYGTNVPVEFRNHLKEQHPDIENPDLAYLHAGKGQKL

SEQ ID NO: 3418 - protein, 307 aa, Homo sapiens
MGVFPEAATKPLLSMGWCGKSLSACGSAGAPVLEDTCRRQDFNPCEYDLKFQRSVLDLSLQWRFANLPNNAKLEMVPASRSREGPENMVRIALQLDDGSRLQDSFCSGQTLWELLSHFPQIRECLQHPGGATPVCVYTRDEVTGEAALRGTTLQSLGLTGGSATIRFVMKCYDPVGKTPGSLGSSASAGQAAASAPLPLESGELSRGDLSRPEDADTSGPCCEHTQEKQSTRAPAAAPFVPFSGGGQRLGGPPGPTRPLTSSSAKLPKSLSSPGGPSKPKKSKSGQDPQQEQEQERERDPQQEQERE

SEQ ID NO: 3419 - protein, 156 aa, Homo sapiens
MSKLPRELTRDLERSLPAVASLGSSLSHSQSLSSHLLPPPEKRRAISDVRRTFCLFVTFDLLFISLLWIIELNTNTGIRKNLEQEIIQYNFKTSFFDIFVLAFFRFSGLLLGYAVLRLRHWSRRWCPVHSSLSRSSSLSCSAKGHLATCSPSSLLS

SEQ ID NO: 3420 - protein, 469 aa, Homo sapiens
MLPPWTLGLLLLATVRGKEVCYGQLGCFSDEKPWAGTLQRPVKLLPWSPEDIDTRFLLYTNENPNNFQLITGTEPDTIEASNFQLDRKTRFIIHGFLDKAEDSWPSDMCKKMFEVEKVNCICVDWRHGSRAMYTQAVQNIRVVGAETAFLIQALSTQLGYSLEDVHVIGHSLGAHTAAEAGRRLGGRVGRITGLDPAGPCFQDEPEEVRLDPSDAVFVDVIHTDSSPIVPSLGFGMSQKVGHLDFFPNGGKEMPGCKKNVLSTITDIDGIWEGIGGFVSCNHLRSFEYYSSSVLNPDGFLGYPCASYDEFQESKCFPCPAEGCPKMGHYADQFKGKTSAVEQTFFLNTGESGNFTSURYKISVTLSGKEKVNGYIRIALYGSNENSKQYEIFKGSLKPDASHTCAIDVDFNVGKIQKVKFLWNKRGINLSEPKLGASQITVQSGEDGTEYNFCSSDTVEENVLQSLYPC

SEQ ID NO: 3421 - protein, 248 aa, Homo sapiens
MSGLGRSRRGGRSRVDQEERWSLSCRKEQGKFYDHLLRDCISCASICGQHPKQCAYFCENKLRSPVNLPPELRRQRSGEVENNSDNSGRYQGLEHRGSEASPALPGLKLSADQVALVYSTLGLCLCAVLCCFLVAVACFLKKRGDPCSCQPRSRPRQSPAKSSQDHAMEAGSPVSTSPEPVETCSFCFPECRAPTQESAVTPGTPDPTCAGRKTKPPPVLTAGNCGVHRPPPETSTGSPRGQRLLWTQ

SEQ ID NO: 3422 - protein, 89 aa, Homo sapiens
IDVSQSVEPTHPHGLEFLFRDCRNVSQFFQKGGVKEALSERELFNAVSGLNITADNEADFLAEVTATPCKDDGDARISANSCLSMGLSC

SEQ ID NO: 3423 - protein, 503 aa, Homo sapiens
MDLVGVASPEPGTAAAWGPSKCPWAIPQNTISCSLADVMSEQLAKELQLEEEAAVFPEVADLMLAQMLQMEYDREYDAQLRREEKKFNGDSKVSISFENYRKVHPYEDSDSSEDEVDWQDTRDDPYRPAKPVPTPKKGFIGKGKDITTKHDEVVCGRKNTARMENFAPEFQVGDGIGMDLKLSNHVFNALKQHAYSEERRSARLHEKKEHSTAEKAVDPKTRLLMYKMVNSGMLETITGCISTGKESVVFHAYGGSMEDEKEDSKVIPTECAIKVFKTTLNEFKNRDKYIKDDFRFKDRFSKLNPRKIIRMWAEKEMHNLARMQRAGIPCPTVVLLKKHILVMSFIGHDQVPAPKLKEVKLNSEEMKEAYYQTLHLMRQLYHECTLVHADLSEYNMLWHAGKVWLIDVSQSVEPTHPHGLEFLFRDCRNVSQFFQKGGVKEALSERELFNAVSGLNITADNEADFLAEIEALEKMNEDHVQKNGRKAASFLKDDGDPPLLYDE

SEQ ID NO: 3424 - protein, 656 aa, Homo sapiens
MAGERGASAVLFDITEDRAAAEQLQQPLGLTWPVVLIWGNDAEKLMEFVYKNQKAHVRIELKEPPAWPDYDVWILMTVVGTIFVIILASVLRIRCRPRHSRPDPLQQRTAWAISQLATRRYQASCRQARGEWPDSGSSCSSAPVCAICLEEFSEGQELRVISCLHEFHRNCVDPWLHQHRTCPLCMFNITEGDSFSQSLGPSRSYQEPGRRLHLIRQHPGHAHYHLPAAYLLGPSRSAVARPPRPGPFLPSQEPGMGPRHHRFPRAAHPRAPGEQQRLAGAQHPYAQGWGLSHLQSTSQHPAACPVPLRRARPPDSSGSGESYCTERSGYLADGPASDSSSGPCHGSSSDSVVNCTDISLQGVHGSSSTFCSSLSSDFDPLVYCSPKGDPQRVDMQPSVTSRPRSLDSVVPTGETQVSSHVHYHRHRHHHYKKRFQWHGRKPGPETGVPQSRPPIPRTQPQPEPPSPDQQVTRSNSAAPSGRLSNPQCPRALPEPAPGPVDASSICPSTSSLFNLQKSSLSARHPQRKRRGGPSEPTPGSRPQDATVHPACQIFPHYTPSVAYPWSPEAHPLICGPPGLDKRLLPETPGPCYSNSQPVWLCLTPRQPLEPHPPGEGPSEWSSDTAEGRPCPYPHCQVLSAQPGSEEELEELCEQAV

SEQ ID NO: 3425 - protein, 390 aa, Homo sapiens
MLSFSRDRLPSGRRVSGKCPPPPLGMAVGRGGSGCPEEGSGRKLELLESQLPAERAREEAGPSVRRPRDKLHKPKATQTEVKPSVRFNLRTSKDPEHEGCYLSVGHSQPLEDCSFNMTAKTFFIIHGWTMSGIFENWLHKLVSALHTREKDANVVVVDWLPLAHQLYTDAVNNTRVVGHSIARMLDWLQEKDDFSLGNVHLIGYSLGAHVAGYAGNFVKGTVGRITGLDPAGPMFEGADIHKRLSPDDADFVDVLHTYTRSFGLSIGIQMPVGHIDIYPNGGDFQPGCGLNDVLGSIAYGTITEVVKCEHERAVHLFVDSLVNQDKPSFAFQCTDSNRFKKGICLSCRKNRCNSIGYNAKKMRNKRNSKMYLKTRAGMPFRGNLQSLECP

SEQ ID NO: 3426 - protein, 91 aa, Homo sapiens
ASPLRTSRSRPHPPSIGHPAVVLTSYRSTAERKLLPLLKPPKPTRVRQDATIFGDPPQPDLDLLSEDGIQTGDSPDEAPQNTPPATVEGRY

SEQ ID NO: 3427 - protein, 217 aa, Homo sapiens
MWPLTQNEECTVTGFLRDKLQYRSRLQYMKHYFPINYKISVPYEGVFRIANVTRLQRAQVSERELRYLWVLVSLSATESVQDVLLEGHPSWKYLQEVETLLLNVQQGLTDVEVSPKVESVLSLLNAPGPNLKLVRPKALLDNCFRVMELLYCSCCKQSSVLNWQDCEVPSPQSCSPEPSLQYAATQLYPPPPWSPSSPPHSTGSVRPVRAQGEGLLP

SEQ ID NO: 3428 - protein, 3795 aa, Homo sapiens
MVVSAGPWSSEKAEMNILEINETLRPQLAEKKQQFRSLKEKCFLTQLAGFLANRQKKYKYEECKDLIKFMLRNERQFKEEKLAEQLKQAEELRQYKVLVHSQERELTQLREKLREGRDASRSLYEHLQALLTPDEPDKSQGQDLQEQLAEGCRLAQHLVQKLSPENDEDEDEDVQVEEAEKVLESSAPREVQKAEESKVPEDSLEECAITCSNSHGPCDSNQPHKNIKITFEEDEVNSTLVVDRESSHDECQDALNILPVPGPTSSATNVSMVVSAGPLSSEKAEMNILEINEKLRPQLAEKKQQFRNLKEKCFLTQLSGFLANQQKKYKYEECKDLIKFMLRNERQFKEEKLAEQLKQAEELRQYKVLVHAQERELTQLKEKLREGRDASRSLNEHLQALLTPYEPDKSQGQDLQEQLAEGCRLAQHLVQKLSPENDNDDDEDVQVEVAEKVQKSSAPREMQKAEEKEVPEDSLEECAITYSNSHGSYDSNQPHRKTKITFEEDKVDSTLIGSSSHVEWEDAVHIIPENESDDEEEEEKGPVSPRNLQESEEEEVPQESWDEGYSTLSIPPEMLASYQSYSSTFHSLEEQQVCMAVDIGRHRWDQVKKEDQEATGPRLSRELLDEKGPEVLQDSQDRCYSTPSGCLELTDSCQPYRSAFYILEQQRVGLAIDMDEIEKYQEVEEDQDPSCPRLSRELLDEKEPEVLQDSLDRCYSTPSGYLELPDLGQPYSSAVYSLEEQYLGLALDVDRIKKDQEEEEDQGPPCPRLSRELLEVVEPEVLQDSLDRCYSTPSSCLEQPDSCQPYGSSFYALEEKHVGFSLDVGEIEKKGKGKKRRGRRSKKERRRGRKEGEEDQNPPCPRLSRELLDEKGPEVLQDSLDRCYSTPSGCLELTDSCQPYRSAFYVLEQQRVGFAFDMDEIEKYQEVEEDQDPSCPRLSRELLDEKEPEVLQDSLDRCYSTPSGYLELPDLGQPYSSAVYSLEEQYLGLALDVDRIKKDEEEEEDQDPPCPRLSRELLEVVEPEVLQDSLDRCYSTPSSCLEQPDSCQPYGSSFYALEENHVGFSLDVGEIEKKGKGKKRRGRRSKKERRRGRKEGEEDQNPPCPRLSRELLEEKGPEVLQDSLDRCYSTPSGCLELTDSCQPYRSAFYVLEQQRVGFAVDMDEIEKYQEVEEDQDPSCPRLSRELLDEKEPEVLQDSLDRCYSTPSGYLELPDLGQPYSSAVYSLEEQYLGLALDVDRIKKDEEEEEDQDPPCPRLSRELLEVVEPEVLQDSLDRCYSTPSSCLEQPDSCQPYGSSFYALEEKHVGFSLDVGEIEKKGKGKKRRGRRSKKERRRGRKEGEEDQNPPCPRLSRELLEEKGPEVLQDSLDRCYSTPSGCLELTDSCQPYRSAFYVLEQQRVGFAVDMDEIEKYQEVEEDQDPSCPRLSRELLDEKEPEVLQDSLDRCYSTPSGYLELPDLGQPYSSAVYSLEEQYLGLALDVDRIKKDEEEEEDQDPPCPRLSRELLEVVEPEVLQDSLDRCYSTPSSCLEQPDSCQPYGSSFYALEEKHVGFSLDVGEIEKKGKGKKRRGRRSKKERRRGRKEGEEDQNPPCPRLSRELLDEKGPEVLQDSLDRCYSTPSGCLELTDSCQPYRSAFYVLEQQHVGLAVDMDEIEKYQEVEEDQDPSCPRLSRELLDEKEPEVLQDSLDRCYSTPSGYLELPDLGQPYSSAVYSLEEQYLGLALDVDRIKKDQEEEEDQGPPCPRLSRELLEVVEPEVLQDSLDRCYSTPSSCLEQPDSCQPYGSSFYALEEKHVGFSLDVGEIEKKGKGKKRRGRRSKKERRRGRKEGEEDQNPPCPRLSRELLDEKGPEVLQDSLDRCYSTPSGCLELTDSCQPYRSAFYVLEQQHVGLAVDMDEIEKYQEVEEDQDPSCPRLSRELLDEKEPEVLQDSLDRCYSTPSGYLELPDLGQPYSSAVYSLEEQYLGLALDVDRIKKDQEEEEDQGPPCPRLSRELLEVVEPEVLQDSLDRCYSTPSSCLEQPDSCQPYGSSFYALEEKHVGFSLDVGEIEKKGKGKKRRGRRSKKERRRGRKEGEEDQNPPCPRLSRELLDEKGPEVLQDSLDRCYSTPSGCLELTDSCQPYRSAFYVLEQQHVGLAVDMDEIEKYQEVEEDQDPSCPRLSRELLDEKEPEVLQDSLDRCYSTPSGYLELPDLGQPYSSAVYSLEEQYLGLALDVDRIKKDQEEEEDQGPPCPRLSRELLEVVEPEVLQDSLDRCYSTPSSCLEQPDSCQPYGSSFYALEEKHVGFSLDVGEIEKKGKGKKRRGRRSKKERRRGRKEGEEDQNPPCPRLSRELLDEKGPEVLQDSLDRCYSTPSGCLELTDSCQPYRSAFYVLEQQHVGLAVDMDEIEKYQEVEEDQDPSCPRLSRELLDEKEPEVLQDSLDRCYSTPSGYLELPDLGQPYSSAVYSLEEQYLGLALDVDRIKKDQEEEEDQDPPCPRLSRELLEVVEPEVLQDSLDRCYSTPSSCLEQPDSCQPYGSSFYALEEKHVGFSLDVGEIEKKGKGKKRRGRRSKKERRRGRKEGEEDQNPPCPRLSRELLDEKGPEVLQDSLDRCYSTPSGCLELTDSCQPYRSAFYVLEQQHVGLAVDMDEIEKYQEVEEDQDPSCPRLSRELLDEKEPEVLQDSLDRCYSTPSGYLELPDLGQPYSSAVYSLEEQYLGLALDVDRIKKDQEEEEDQGPPCPRLSRELLEVVEPEVLQDSLDRCYSTPSSCLEQPDSCQPYGSSFYALEEKHVGFSLDVGEIEKKGKGKKRRGRRSKKERRRGRKEGEEDQNPPCPRLSRELLDEKGPEVLQDSLDRCYSTPSGCLELTDSCQPYRSAFYVLEQQHVGLAVDMDEIEKYQEVEEDQDPSCPRLSRELLDEKEPEVLQDSLDRCYSTPSGYLELPDLGQPYSSAVYSLEEQYLGLALDVDRIKKDQEEEEDQGPPCPRLSRELLEVVEPEVLQDSLDRCYSTPSSCLEQPDSCQPYGSSFYALEEKHVGFSLDVGEIEKKGKGKKRRGRRSKKERRRGRKEGEEDQNPPCPRLSRELLDEKGPEVLQDSLDRCYSTPSGCLELTDSCQPYRSAFYVLEQQHVGLAVDMDEIEKYQEVEEDQDPSCPRLSRELLDEKEPEVLQDSLDRCYSTPSGYLELPDLGQPYSSAVYSLEEQYLGLALDVDRIKKDEEEEEDQDPPCPRLSRELLEVVEPEVLQDSLDRCYSTPSSCLEQPDSCQPYGSSFYALEEKHVGFSLDVGEIEKKGKGKKRRGRRSKKERRRGRKEGEEDQNPPCPRLSRELLDEKGPEVLQDSLDRCYSTPSGYLELTDSCQPYRSAFYVLEQQHVGLAVDMDEIEKYQEVEEDQDPSCPRLSRELLDEKEPEVLQDSLDRCYSTPSGYLELPDLGQPYSSAVYSLEEQYLGLALDVDRIKKDQEEEEDQGPPCPRLSRELLEVVEPEVLQDSLDRCYSTPSSCLEQPDSCQPYGSSFYALEEKHVGFSLDVGEIEKKGKGKKRRGRRSKKERRRGRKEGEEDQNPPCPRLSRELLDEKGPEVLQDSLDRCYSTPSGCLELCDSCQPYRSAFYVLEQQRVGLAVDMDEIEKYQEVEEDQDPSCPRLSRELLDEKEPEVLQDSLDRCYSTPSGYLELPDLGQPYSSAVYSLEEQYLGLALDVDKIEKKGKGKKRRGRRSKKERRRGRKEGEEDQNPPCPRLNGVLMEVEEREVLQDSLDRCYSTPSMYFELPDSFQHYRSVFYSFEEQHISFALYVDNRFFTLTVTSLHLVFQMGVIFPQ

SEQ ID NO: 3429 - protein, 470 aa, Homo sapiens
MVPASRSREGPENMVRIALQLDDGSRLQDSFCSGQTLWELLSHFPQIRECLQHPGGATPVCVYTRDEVTGEAALRGTTLQSLGLTGGSATIRFVMKCYDPVGKTPGSLGSSASAGQAAASAPLPLESGELSRGDLSRPEDADTSGPCCEHTQEKQSTRAPAAAPFVPFSGGGQRLGGPPGPTRPLTSSSAKLPKSLSSPGGPSKPKKSKSGQDPQQEQEQERERDPQQEQERERPVDREPVDREPVVCHPDLEERLQAWPAELPDEFFELTVDDVRRRLAQLKSERKRLEEAPLVTKAFREAQIKEKLERYPKTESLSVAQAGVSGAISAHCKLRLPGSSGSPASASQVAGISGGSEGPVPRPLRPTGLLPPQRDSGGLARLREEPPGEPRAVILPVHHPSKNSPGRPHADPLSGEPLPGRSGALGSRGAGRCLPGAWPAGACHLPICGRCAGGQVHVQGRRVPFPIASP

SEQ ID NO: 3430 - protein, 1138 aa, Homo sapiens
MGEEGPPSLEYIQAKDLFPPKELVKEEENLQVPFTVLQGEGVEFLGRAADALIAISNYRLHIKFKDSVINVPLRMIDSVESRDMFQLHISCKDSKVVRCHFSTFKQCQEWLSRLSRATARPAKPEDLFAFAYHAWCLGLTEEDQHTHLCQPGEHIRCRQEAELARMGFDLQNVWRVSHINSNYKLCPSYPQKLLVPVWITDKELENVASFRSWKRIPVVVYRHLRNGAAIARCSQPEISWWGWRNADDEYLVTSIAKACALDPGTRATGGSLSTGNNDTSEACDADFDSSLTACSGVESTAAPQKLLILDARSYTAAVANRAKGGGCECEEYYPNCEVVFMGMANIHAIRNSFQYLRAVCSQMPDPSNWLSALESTKWLQHLSVMLKAAVLVANTVDREGRPVLVHCSDGWDRTPQIVALAKILLDPYYRTLEGFQVLVESDWLDFGHKFGDRCGHQENVEDQNEQCPVFLQWLDSVHQLLKQFPCLFEFNEAFLVLHPVCHVRALHLWTAVYLPASSPCTLGEENMDLYLSPVAQSQEFSGRSLDRLPKTRSMDDLLSACDTSSPLTRTSSDPNLNNHCQEVRVGLEPWHSNPEGSETSFVDSGVGGPQQTVGEVGLPPPLPSSQKDYLSNKPFKSHKSCSPSYKLLNTAVPREMKSNTSDPEIKVLEETKGPAPDPSAQDELGRTLDGIGEPPEHCPETEAVSALSKVISNKCDGVCNFPESSQNSPTGTPQQAQPDSMLGVPSKCVLDHSLSTVCNPPSAACQTPLDPSTDFLNQDPSGSVASISHQEQLSSVPDLTHGEEDIGKRGNNRNGQLLENPRFGKMPLELVRKPISQSQISEFSFLGSNWDSFQGMVTSFPSGEATPRRLLSYGCCSKRPNSKQMRATGPCFGGQWAQREGVKSPVCSSHSNGHCTGPGGKNQMWLSSHPKQVSSTKPVPLNCPSPVPPLYLDDDGLPFPTDVIQHRLRQIEAGYKQEVEQLRRQVRELQMRLDIRHCCAPPAEPPMDYEDDFTCLKESDGSDTEDFGSDHSEDCLSEASWEPVDKKETEVTRWVPDHMASHCYNCDCEFWLAKRRHHCRNCGNVFCAGCCHLKLPIPDQQLYDPVLVCNSCYEHIQVSRARELMSQQLKKPIATASS

SEQ ID NO: 3431 - protein, 5207 aa, Homo sapiens
MECPSCQHVSKEETPKFCSQCGERLPPAAPIADSENNNSTMASASEGEMECGQELKEEGGPCLFPGSDSWQENPEEPCSKASWTVQESKKKKRKKKKKGNKSASSELASLPLSPASPCHLTLLSNPWPQDTALPHSQAQQSGPTGQPSQPPGTATTPLEGDGLSAPTEVGDSPLQAQALGEAGVATGSEAQSSPQFQDHTEGEDQDASIPSGGRGLSQEGTGPPTSAGEGHSRTEDAAQELLLPESKGGSSEPGTELQTTEQQAGASASMAVDAVAEPANAVKGAGKEMKEKTQRMKQPPATTPPFKTHCQEAETKTKDEMAAAEEKVGKNEQGEPEDLKKPEGKNRSAAAVKNEKEQKNQEADVQEVKASTLSPGGGVTVFFHAIISLHFPFNPDLHKVFIRGGEEFGESKWDSNICELHYTRDLGHDRVLVEGIVCISKKHLDKYIPYKYVIYNGESFEYEFIYKHQQKKGEYVNRCLFIKSSLLGSGDWHQYYDIVYMKPHGRLQKVMNHITDGPRKDLVKGKQIAAALMLDSTFSILQTWDTINLNSFFTQFEQFCFVLQQPMIYEGQAQLWTDLQYREKEVKRYLWQHLKKHVVPLPDGKSTDFLPVDCPVRSKLKTGLIVLFVVEKIELLLEGSLDWLCHLLTSDASSPDEFHRDLSHILGIPQSWRLYLVNLCQRCMDTRTYTWLGALPVLHCCMELAPRHKDAWRQPEDTWAALEGLSFSPFREQMLDTSSLLQFMREKQHLLSIDEPLFRSWFSLLPLSHLVMYMENFIEHLGRFPAHILDCLSGIYYRLPGLEQVLNTQDVQDVQNVQNILEMLLRLLDTYRDKIPEEALSPSYLTVCLKLHEAICSSTKLLKFYELPALSAEIVCRMIRLLSLVDSAGQRDETGNNSVQTVFQGTLAATKRWLREVFTKNMLTSSGASFTYVKEIEVWRRLVEIQFPAEHGWKESLLGDMEWRLTKEEPLSQITAYCNSCWDTKGLEDSVAKTFEKCIIEAVSSACQSQTSILQGFSYSDLRKFGIVLSAVITKSWPRTADNFDDILKHLLTLADVKHVFRLCGTDEKILANVTEDAKRLIAVADSVLTKVVGDLLSGTILVGQLELIIKHKNQFLDIWQLREKSLSPQDEQCAVEEALDWRREELLLLKKEKRCVDSLLKMCGNVKHLIQVDFGVLAVRHSQDLSSKRLNDTVTVRLSTSSNSQRATHYHLSSQVQEMAGKIDLLRDSHIFQLFWREAAEPLSEPKEDQEAAELLSEPEEESERHILELEEVYDYLYQPSYRKFIKLHQDLKSGEVTLAEIDVIFKDFVNKYTDLDSELKIMCTVDHQDQRDWIKDRVEQIKEYHHLHQAVHAAKVILQVKESLGLNGDFSVLNTLLNFTDNFDDFRRETLDQINQELIQAKKLLQDISEARCKGLQALSLRKEFICWVREALGGINELKVFVDLASISAGENDIDVDRVACFHDAVQGYASLLFKLDPSVDFSAFMKHLKKLWKALDKDQYLPRKLCDSARNLEWLKTVNESHGSVERSSLTLATAINQRGIYVIQAPKGGQKISPDTVLHLILPESPGSHEESREYSLEEVKELLNKLMLMSGKKDRNNTEVERFSEVFCSVQRLSQAFIDLHSAGNMLFRTWIAMAYCSPKQGVSLQMDFGLDLVTELKEGGDVTELLAALCRQMEHFLDSWKRFVTQKRMEHFYLNFYTAEQLVYLSTELRKQPPSDAALTMLSFIKSNCTLRDVLRASVGCGSEAARYRMRRVMEELPLMLLSEFSLVDKLRIIMEQSMRCLPAFLPDCLDLETLGHCLAHLAGMGGSPVERCLPRGLQVGQPNLVVCGHSEVLPAALAVYMQTPSQPLPTYDEVLLCTPATTFEEVALLLRRCLTLGSLGHKVYSLLFADQLSYEVARQAEELFHNLCTQQHREDYQLVMVCDGDWEHCYLPSAFSQHKVFVTPQAPLEAIQAYLAGHYRVPKQTLSAAAVFNDRLCVGIVASERAGVGKSLYVKRLHDKMKMQLNVKNVPLKTIRLIDPQVDESRVLGALLPFLDAQYQKVPVLFHLDVTSSVQTGIWVFLFKLLILQYLMDINGKMWLRNPCHLYIVEILERRTSVPSRSSSALRTRVPQFSFLDIFPKVTCRPPKEVIDMELSALRSDTEPGMDLWEFCSETFQRPYQYLRRFNQNQDLDTFQYQEGSVEGTPEECLQHFLFHCGVINPSWSELRNFARFLNYQLRDCEASLFCNPSFIGDTLRGFKKFVVTFMIFMARDFATPSLHTSDQSPGKHMVTMDGVREEDLAPFSLRKRWESEPHPYVFFNDDHTTMTFIGFHLQPNINGSVDAISHLTGKVIKRDVMTRDLYQGLLLQRVPFNVDFDKLPRHKKLERLCLTLGIPQATDPDKTYELTTDNMLKILAIEMRFRCGIPVIIMGETGCGKTRLIKFLSDLRRGGTNADTIKLVKVHGGTTADMIYSRVREAENVAFANKDQHQLDTILFFDEANTTEAISCIKEVLCDHMVDGQPLAEDSGLHIIAACNPYRKHSEEMICRLESAGLGYRVSMEETADRLGSIPLRQLVYRVHALPPSLIPLVWDFGQLSDVAEKLYIQQIVQRLVESISLDENGTRVITEVLCASQGFMRKTEDECSFVSLRDVERCVKVFRWFHEHSAMLLAQLNAFLSKSSVSKNHTERDPVLWSLMLAIGVCYHASLEKKDSYRKAIARFFPKPYDDSRLLLDEITRAQDLFLDGVPLRKTIAKNLALKENVFMMVVCIELKIPLFLVGKPGSSKSLAKTIVADAMQGPAAYSDLFRSLKQVHLVSFQCSPHSTPQGIISTFRQCARFQQGKDLQQYVSVVVLDEVGLAEDSPKMPLKTLHPLLEDGCIEDDPAPHKKVGFVGISNWALDPAKMNRGIFVSRGSPNETELIESAKGICSSDILVQDRVQGYFASFAKAYETVCKRQDKEFFGLRDYYSLIKMVFAAAKASNRKPSPQDIAQAVLRNFSGKDDIQALDIFLANLPEAKCSEEVSPMQLIKQNIFGPSQKVPGGEQEDAESRYLLVLTKNYVALQILQQTFFEGDQQPEIIFGSGFPKDQEYTQLCRNINRVKICMETGKMVLLLNLQNLYESLYDALNQYYVHLGGQKYVDLGLGTHRVKCRVHPNFRLIVIEEKDVVYKHFPIPLINRLEKHYLDINTVLEKWQKSIVEELCAWVEKFINVKAHHFQKRHKYSPSDVFIGYHSDACASVVLQVIERQGPRALTEELHQKVSEEAKSILLNCATPDAVVRLSAYSLGGFAAEWLSQEYFHRQRHNSFADFLQAHLHTADLERHAIFTEITTFSRLLTSHDCEILESEVTGRAPKPTLLWLQQFDTEYSFLKEVRNCLTNTAKCKILIFQTDFEDGIRSAQLIASAKYSVINEINKIRENEDRIFVYFITKLSRVGRGTAYVGFHGGLWQSVHIDDLRRSTLMVSDVTRLQHVTISQLFAPGDLPELGLEHRAEDGHEEAMETEASTSGEVAEVAEEAMETESSEKVGKETSELGGSDVSILDTTRLLRSCVQSAVGMLRDQNESCTRNMRRVVLLLGLLNEDDACHASFLRVSKMRLSVFLKKQEESQFHPLEWLAREACNQDALQEAGTFRHTLWKRVQGAVTPLLASMISFIDRDGNLELLTRPDTPPWARDLWMFIFSDTMLLNIPLVMNNERHKGEMAYIVVQNHMNLSENASNNVPFSWKIKDYLEELWVQAQYITDAEGLPKKFVDIFQQTPLGRFLAQLHGEPQQELLQCYLKDFILLTMRVSTEEELKFLQMALWSCTRKLKAASEAPEEEVSLPWVHLAYQRFRSRLQNFSRILTIYPQVLHSLMEARWNHELAGCEMTLDAFAAMACTEMLTRNTLKPSPQAWLQLVKNLSMPLELICSDEHMQGSGSLAQAVIREVRAQWSRIFSTALFVEHVLLGTESRVPELQGLVTEHVFLLDKCLRENSDVKTHGPFEAVMRTLCECKETASKTLSRFGIQPCSICLGDAKDPVCLPCDHVHCLRCLRAWFASEQMICPYCLTALPDEFSPAVSQAHREAIEKHARFRQMCNSFFVDLVSTICFKDNAPPEKEVIESLLSLLFVQKGRLRDAAQRHCEHTKSLSPFNDVVDKTPVIRSVILKLLLKYSFHDVKDYIQEYLTLLKKKAFITEDKTELYMLFINCLEDSILEKTSAYSRNDELNHLEEEGRFLKAYSPASRGREPANEASVEYLQEVARIRLCLDRAADFLSEPEGGPEMAKEKQCYLQQVKQFCIRVENDWHRVYLVRKLSSQRGMEFVQGLSKPGRPHQWVFPKDVVKQQGLRQDHPGQMDRYLVYGDEYKALRDAVAKAVLECKPLGIKTALKACKTPQSQQSAYFLLTLFREVAILYRSHNASLHPTPEQCEAVSKFIGECKILSPPDISRFATSLVDNSVPLLRAGPSDSNLDGTVTEMAIHAAAVLLCGQNELLEPLKNLAFSPATMAHAFLPTMPEDLLAQARRWKGLERVHWYTCPNGHPCSVGECGRPMEQSICIDCHAPIGGIDHKPRDGFHLVKDKADRTQTGHVLGNPQRRDVVTCDRGLPPVVFLLIRLLTHLALLLGASQSSQALINIIKPPVRDPKGFLQQHILKDLEQLAKMLGHSADETIGVVHLVLRRLLQEQHQLSSRRLLNFDTELSTKEMRNNWEKEIAAVISPELEHLDKTLPTMNNLISQDKRISSNPVAKIIYGDPVTFLPHLPRKSVVHCSKIWSCRKRITVEYLQHIVEQKNGKERVPILWHFLQKEAELRLVKFLPEILALQRDLVKQFQNVQQVEYSSIRGFLSKHSSDGLRQLLHNRITVFLSTWNKLRRSLETNGEINLPKDYCSTDLDLDTEFEILLPRRRGLGLCATALVSYLIRLHNEIVYAVEKLSKENNSYSVDAAEVTELHVISYEVERDLTPLILSNCQYQVEEGRETVQEFDLEKIQRQIVSRFLQGKPRLSLKGIPTLVYRHDWNYEHLFMDIKNKMAQDSLPSSVISAISGQLQSYSDACEVLSVVEVTLGFLSTAGGDPNMQLNVYTQDILQMGDQTIHVLKALNRCQLKHTIALWQFLSAHKSEQLLRLHKEPFGEISSRYKADLSPENAKLLSTFLNQTGLDAFLLELHEMIILKLKNPQTQTEERFRPQWSLRDTLVSYMQTKESEILPEMASQFPEEILLASCVSVWKTAAVLKWNREMR

SEQ ID NO: 3432 - protein, 165 aa, Homo sapiens
MWLPQLDLMRVISAKSQGYSIVTQITGPTTVNGLERGSLTVQCVYRSGWETYLKWWCRGAIWRDCKILVKTSGSEQEVKRDRVSIKDNQKNRTFTVTMEDLMKTDADTYWCGIEKTGNDLGVTVQVTIDPAPVTQEETSSSPTLTGHHLDNRYCSPWRATSAMQT

SEQ ID NO: 3433 - protein, 293 aa, Homo sapiens
MWLPQLDLMRVISAKSQGYSIVTQITGPTTVNGLERGSLTVQCVYRSGWETYLKWWCRGAIWRDCKILVKTSGSEQEVKRDRVSIKDNQKNRTFTVTMEDLMKTDADTYWCGIEKTGNDLGVTVQVTIDPAPVTQEETSSSPTLTGHHLDNRHKLLKLSVLLPLIFTILLLLLVAASLLAWRMMKYQQKAAGMSPEQVLQPLEGDLCYADLTLQLAGTSPQKATTKLSSAQVDQVEVEYVTMASLPKEDISYASLTLGAEDQEPTYCNMGHLSSHLPGRGPEEPTEYSTISRP

SEQ ID NO: 3434 - protein, 493 aa, Homo sapiens
MGRKKKKQLKPWCWYCNRDFDDEKILIQHQKAKHFKCHICHKKLYTGPGLAIHCMQVHKETIDAVPNAIPGRTDIELEIYGMEGIPEKDMDERRRLLEQKTQESQKKKQQDDSDEYDDDDSAASTSFQPQPVQPQQGYIPPMAQPGLPPVPGAPGMPPGIPPLMPGVPPLMPGMPPVMPGMPPGLHHQRKYTQSFCGENIMMPMGGMMPPGPGIPPLMPGMPPGMPPPVPRPGIPPMTQAQAVSAPGILNRPPAPTATVPAPQPPVTKPLFPSAGQMGTPVTSSSTASSNSESLSASSKALFPSTAQAQAAVQGPVGTDFKPLNSTPATTTEPPKPTFPAYTQSTASTTSTTNSTAAKPAASITSKPATLTTTSATSKLIHPDEDISLEERRAQLPKYQRNLPRPGQAPIGNPPVGPIGGMMPPQPGIPQQQGMRPPMPPHGQYGGHHQGMPGYLPGAMPPYGQGPPMVPPYQGGPPRPPMGMRPPVMSQALP

SEQ ID NO: 3435 - protein, 262 aa, Homo sapiens
MSKLPRELTRDLERSLPAVASLGSSLSHSQSLSSHLLPPPEKRRAISDVRRTFCLFVTFDLLFISLLWIIELNTNTGIRKNLEQEIIQYNFKTSFFDIFVLAFFRFSGLLLGYAVLRLRHCCSAKGHLATCSPSSLLSSPGWRPGSLTSKSYPRKLKRSDGILPPRLLLPVDPCCSPVLCPRDSSIHPQNPLQGLTMNQMKKLLGRKVSLLRSGSTSARGRRPRQWWTRSWPRKRTGSLRRIMNMGTPCTPLKFPFTARRLS

SEQ ID NO: 3436 - protein, 248 aa, Homo sapiens
MTEPGASPEDPWVKASPVGAHAGEGRAGRARARRGAGRRGASLLSPKSPTLSVPRGCREDSSHPACAKVEYAYSDNSLDPDDEDSDYHQEAYKESYKDRRRRAHTQAEQKRRDAIKRGYDDLQTIVPTCQQQDFSIGSQKLSKAIVLQKTIDYIQFLHKEKKKQEEEVSTLRKDVTALKIMKVNYEQIVKAHQDNPHEGEDQVSDQVKFNVFQGIMDSLFQSFNASISVASFQELSACVFSWIEEHCK

SEQ ID NO: 3437 - protein, 174 aa, Homo sapiens
MCADDLLSVLLYLLVKTEIPNWMANLSYIKNFRFSSLAKDELGYCLTSFEAAIEYIRQGSLSAKPPESEGFGDRLFLKQRMSLLSQMTSSPTDCLFKHIASGNQKEVERLLSQEDHDKDTVQKMCHPLCFCDDCEKLVSGRLNDPSVVTPFSRDDRGHTPLHVAAVCGQASLID

SEQ ID NO: 3438 - protein, 176 aa, Homo sapiens
MRRPGRKGTGGGQAPSPIANTFLHYRTSKVRVLRAARLERLVGELVFGDREQDPSFMPAFLATYRTFVPTACLLGFLLPPMPPPPPPGVEIKKTAVQDLSFNKNLRAVVSVLGSWLQDHPQDFRDHPAHSDLGSVRTFLGWAAPGSAEAQKAEKLLEDFLEEAEREQEEEPPQVWT

SEQ ID NO: 3439 - protein, 105 aa, Homo sapiens
MMMGSARVAELLLLHGAEPNCADPATLTRPVHDAAREGFLDTLVVLHRAGARLDVRDAWGRLPVDLAEELGHRDVARYLRAAAGGTRGSNHARIDAAEGPSDIPD

SEQ ID NO: 3440 - protein, 205 aa, Homo sapiens
MGTGPAQTPRSTRAGPEPSPAPPGPGDTGDSDVTQEGSGPAGIRGGETVIRAGMGDSPGRGAPERRHKAQPGRARKYEWRPEGPTSMGSLGQREDLQDEDRNSAFTWKVQANNRAYNGQFKEKVILCWQRKKYKTNVIRTAKYNFYSFLPLNLYEQFHRVSNLFFLIIIILQSIPDISTLPWFSLSTPMVCLLFIRATRDLVDDM

SEQ ID NO: 3441 - protein, 773 aa, Homo sapiens
DTPSKFDPINYLGEYLIRNNPNYIKDPGMSGYQRLMKEVTEDLKIYVPDTICNRVSKMKENVKQNRKQRESIDKIIVKVANTRKQALQEQFDEWILDPKGMIPKSVIQNVLQEFFQNPDFKLGSHCKQLDITDSTEPRLNKMEFTEYISSHIKDLKSEMFEELLKHLCHSADEFREVIKADMRRQMFAELFLHCDHGKVGFLDRQRTLALLELFYDHSSQMLRSLLRNPRQWPFIEFEEINLTELWGDMDNQKHIYEGFDKVLLEMNTLLSANHASKTQSKLLESPDQPKLNEQRTSTPSPNPPEQQRGVTAEQGPQRISIEEQQQGKKPTAEQELYIESVIEPGTHTESTLEQGSSRRLLTEQETHRESTTEQGQHKGSIEGQGPRRVSVSEQGSSRESVAEQGSRRESIAEQDRHKGSVAEQGSRRMSAAEQGSLRESVIEEPYQKSEQGPYGEIISEEQEDIGSTSQSRKDSILKSTKYGEPITSEYIEVPLQEKRSWEQTYEEEIFLSSELQEEVPTLSRKDHFPETTKKEVQKDKPCEPKSQKIEGKSWSGEFFTCNWKMKYVTFEDEEQANLIYGNSRFTDLHSIIRNIQSCKEVKGRTAFNGVSFNLLQFVQLLETFVGEDAPLSVSETLTSFFKEGYVETEQEKMNALEQFSQNAFQVRQRLLLEAIFQKWDSDGSGFLDLKEVDELLYTYKEGMEKESMKKDHSRTEVWKFGNVVIEHLYHWIHICSALMKITKQLNSGITPPLPSKTDNYMYAKMPGEGLQEK

SEQ ID NO: 3442 - protein, 1133 aa, Homo sapiens
MAPKTKKGCKVTLPEKPVKLASHTRDTTGVSQMFPSSKARTKSLLGDDVFSTMAGLEEADAEVSGISEADPQALLQAMKDLDGMDADILGLKKSNSAPSKKAAKDPGKGELPNHPKPAGGAIPTKKSLPSPSSSGHQNRRFSSEDLEDPLRGLLSYDEGGITKQPPVTQSKTASDKSPSTVRDQGPSIPLTPGDTPIRKKEELLFDDGDDIMATLGFGDSPKAEKRQIGDQEGPRPARSTLDELLGRGMATKLLARPGTGEHREFKLDKKYQRPQDSEDMWGDEDFTFGAYQPTVVSSEGRQSRRQSVSRFFADSGADPKGEPGSKQSPPMASSPIQPRKGGADWLGLKDEDLDLFPASPTREAHRESSVPVTPSVPPPASQHSTPAGLPPSRAKPPTEGAGSPAKASQASKLRASKEEKEDWLSHALSRKKSQGLAREQHAGTSEGLHLAGTAGHPPSGSQPLTSTQGLEHAAAGGSSGTTARERPCVRPGVSGSPVTQNHAASALPTGSPKRGTAPGDLSATEPATCFPSTQKPTEPSVPVQPLLPESLARSLLPSTEYQKQLLAAQVQLQCSPAELQAELLHSQARLAELEAQVRKLELERAQHELLLGSLQQQHQADLELIESAHRSRIKVLETSYQQREERLRRENEELSARYLSQCQEAEQARAELTAQHQRRLAAIAQEKDQEMERLRELQRASILDMRRDHEEQLQRLKLLKDREVDAATSATSHTRSLNSIIHQMEKFSSSLHELSSRVEASHLTTSQERELGIRQRDEQLRALQERLGQQQRDMEEERSRQQEVIGKMEARLNEQSRLLEQERWRVTAEQSKAESMQRALEEQRKVTAQQMAMERAELERAKSALLEEQKSVMLKCGEERRRLAAEWAEFSAQQKLSKERAEREAERALQVDTQREGTLISLAKQAELKIRASELRAEEKQLAAERAALEQERQELRLEKERINATALRVKLRAEEVESMSKVASEKYEEGERALREAQQVQAEQQARLQAVQQQQERLRKQEQHMHQEHLSLAQQRLQLDRARQDLPSSLVGLFPRAQGPAASSQSALMPPAPTTRWCSQPPTGLDPSPLHLHARLALLRHMAEQDRDFLENEQFFLETLKKGSYNLTSHSA

SEQ ID NO: 3443 - protein, 220 aa, Homo sapiens
MKSVIYHALSQKEANDSDVQPSGAQRAEAFVRAFLKRSTPRMSPQAREDQLQRKAVVLEYFTRHKRKEKKKKAKGLSARQRRELRLFDIKPEQQRYSLFLPLHELWKQYIRDLCSGLKPDTQPQMIQAKLLKADLHGAIISVTKSKCPSYVGITGILLQETKHIFKIITKEDRLKVIPKLNCVFTVETDGFISYIYGSKFQLRSSERSAKKFKAKGTIDL

SEQ ID NO: 3444 - protein, 765 aa, Homo sapiens
MLRSTSTVTLLSGGAARTPGAPSRRANVCRLRLTVPPESPVPEQCEKKIERKEQLLDLSNGEPTRKLPQGVVYGVVRRSDQNQQKEMVVYGWSTSQLKEEMNYIKDVRATLEKVRKRMYGDYDEMRQKIRQLTQELSVSHAQQEYLENHIQTQSSALDRFNAMNSALASDSIGLQKTLVDVTLENSNIKDQIRNLQQTYEASMDKLREKQRQLEVAQVENQLLKMKVESSQEANAEVMREMTKKLYSQYEEKLQEEQRKHSAEKEALLEETNSFLKAIEEANKKMQAAEISLEEKDQRIGELDRLIERMEKERHQLQLQLLEHETEMSGELTDSDKERYQQLEEASASLRERIRHLDDMVHCQQKKVKQMVEEIESLKKKLQQKQLLILQLLEKISFLEGENNELQSRLDYLTETQAKTEVETREIGVGCDLLPRKFICKLPDKGKKIFDSFAKLKAAIAECEEVRRKSELFNPVSLDCKLRQKAIAEVDVGTDKAQNSDPILDTSSLVPGCSSVDNIKSSQTSQNQGLGRPTLEGDEETSEVEYTVNKGPASSNRDRVPPSSEASEHHPRHRVSSQAEDTSSSFDNLFIDRLQRITIADQGEQQSEENASTKNLTGLSSGTEKKPHYMEVLEMRAKNPVPQLRKFKTNVLPFRQNDSSSHCQKSGSPISSEERRRRDKQHLDDITAARLLPLHHMPTQLLSIEESLALQKQQKQNYEEMQAKLAAQKLAERLNIKMRSYNPEGESSGRYREVRDEDDDWSSDEF

SEQ ID NO: 3445 - protein, 142 aa, Homo sapiens
SFRTILRDLTRLQPHNLADVLTVNPDSPASDPTVFHKRYLKKIRDLGEGHFGKVSLYCYDPTNDGTGEMVAVKALKADCGPQHRSGWKQEIDILRTLYHEHIIKYKGCCEDQGLSSHEELLGDRGVLSPNLREPHTHSEDSP

SEQ ID NO: 3446 - protein, 928 aa, Homo sapiens
MAVRFQVADMEELTIWEQHTATLSKDPRRGFGIAISGGRDRPGGSMVVSDVVPGGPAEGRLQTGDHIVMVNGVSMENATSAFAIQILKTCTKMANITVKRPRRIHLPATKASPSSPGRQDSDEDDGPQRVEEVDQGRGYDGDSSSGSGRSWDERSRRPRPGRRGRAGSHGRRSPGGGSEANGLALVSGFKRLPRQDVQMKPVKSVLVKRRDSEEFGVKLGSQIFIKHITDSGLAARHRGLQEGDLILQINGVSSQNLSLNDTRRLIEKSEGKLSLLVLRDRGQFLVNIPPAVSDSDSSPLEDISDLASELSQAPPSHIPPPPRHAQRSPEASQTDSPVESPRLRRESSVDSRTISEPDEQRSELPRESSYDIYRVPSSQSMEDRGYSPDTRVVRFLKGKSIGLRLAGGNDVGIFVSGVQAGSPADGQGIQEGDQILQVNDVPFQNLTREEAVQFLLGLPPGEEMELVTQRKQDIFWKMVQSRVGDSFYIRTHFELEPSPPSGLGFTRGDVFHVLDTLHPGPGQSHARGGHWLAVRMGRDLREQERGIIPNQSRAEQLASLEAAQRAVGVGPGSSAGSNARAEFWRLRGLRRGAKKTTQRSREDLSALTRQGRYPPYERVVLREASFKRPVVILGPVADIAMQKLTAEMPDQFEIAETVSRTDSPSKIIKLDTVRVIAEKDKHALLDVTPSAIERLNYVQYYPIVVFFIPESRPALKALRQWLAPASRRSTRRLYAQAQKLRKHSSHLFTATIPLNGTSDTWYQELKAIIREQQTRPIWTAEDQLDGSLEDNLDLPHHGLADSSADLSCDSRVNSDYETDGEGGAYTDGEGYTDGEGGPYTDVDDEPPAPALARSSEPVQADESQSPRDRGRISAHQGAQVDSRHPQGQWRQDSMRTYEREALKKKFMRVHDAESSDEDGYDWGPATDL

SEQ ID NO: 3447 - protein, 82 aa, Homo sapiens
MVQKKPAELQGFHRSFKGQNPFELAFSLDQPDHGDSDFGLQCSARPDMPASQPIDIPDAKKRGKKKKRGRATDSFSGRFEDH

SEQ ID NO: 3448 - protein, 220 aa, Homo sapiens
MRQKHYLEAAARGLHDSCPGQARYLLWAYTSSHDDKSTFEETCPYCFQLLVLDNSRVRLKPKARLTPKIQKLLNREARNYTLSFKEAKMVKKFKDSKSVLLITCKTCNRTVKHHGKSRSFVSTLKSNPATPTSKLSLKTPERRTANPNHDMSGSKGKSPASVFRTPTSGQSVSTCSSKNTSKTKKHFSQLKMLLSQNESQKIPKVDFRNFLSSLKGGLLK

SEQ ID NO: 3449 - protein, 32759 aa, Homo sapiens
MTTQAPTFTQPLQSVVVLEGSTATFEAHISGFPVPEVSWFRDGQVISTSTLPGVQISFSDGRAKLTIPAVTKANSGRYSLKATNGSGQATSTAELLVKAETAPPNFVQRLQSMTVRQGSQVRLQVRVTGIPTPVVKFYRDGAEIQSSLDFQISQEGDLYSLLIAEAYPEDSGTYSVNATNSVGRATSTAELLVQGEEEVPAKKTKTIVSTAQISESRQTRIEKKIEAHFDARSIATVEMVIDGAAGQQLPHKTPPRIPPKPKSRSPTPPSIAAKAQLARQQSPSPIRHSPSPVRHVRAPTPSPVRSVSPAARISTSPIRSVRSPLLMRKTQASTVATGPEVPPPWKQEGYVASSSEAEMRETTLTTSTQIRTEERWEGRYGVQEQVTISGAAGAAASVSASASYAAEAVATGAKEVKQDADKSAAVATVVAAVDMARVREPVISAVEQTAQRTTTTAVHIQPAQEQVRKEAEKTAVTKVVVAADKAKEQELKSRTKEVITTKQEQMHVTHEQIRKETEKTFVPKVVISAAKAKEQETRISEEITKKQKQVTQEAIRQETEITAASMVVVATAKSTKLETVPGAQEETTTQQDQMHLSYEKIMKETRKTVVPKVIVATPKVKEQDLVSRGREGITTKREQVQITQEKMRKEAEKTALSTIAVATAKAKEQETILRTRETMATRQEQIQVTHGKVDVGKKAEAVATVVAAVDQARVREPREPGHLEESYAQQTTLEYGYKERISAAKVAEPPQRPASEPHVVPKAVKPRVIQAPSETHIKTTDQKGMHISSQIKKTTDLTTERLVHVDKRPRTASPHFTVSKISVPKTEHGYEASIAGSAIATLQKELSATSSAQKITKSVKAPTVKPSETRVRAEPTPLPQFPFADTPDTYKSEAGVEVKKEVGVSITGTTVREERFEVLHGREAKVTETARVPAPVEIPVTPPTLVSGLKNVTVIEGESVTLECHISGYPSPTVTWYREDYQIESSIDFQITFQSGIARLMIREAFAEDSGRFTCSAVNEAGTVSTSCYLAVQVSEEFEKETTAVTEKFTTEEKRFVESRDVVMTDTSLTEEQAGPGEPAAPYFITKPVVQKLVEGGSVVFGCQVGGNPKPHVYWKKSGVPLTTGYRYKVSYNKQTGECKLVISMTFADDAGEYTIVVRNKHGETSASASLLEEADYELLMKSQQEMLYQTQVTAFVQEPKVGETAPGFVYSEYEKEYEKEQALIRKKMAKDTVVVRTYVEDQEFHISSFEERLIKEIEYRIIKTTLEELLEEDGEEKMAVDISESEAVESGFDSRIKNYRILEGMGVTFHCKMSGYPLPKIAWYKDGKRIKHGERYQMDFLQDGRASLRIPVVLPEDEGIYTAFASNIKGNAICSGKLYVEPAAPLGAPTYIPTLEPVSRIRSLSPRSVSRSPIRMSPARMSPARMSPARMSPARMSPGRRLEETDESQLERLYKPVFVLKPVSFKCLEGQTARFDLKVVGRPMPETFWFHDGQQIVNDYTHKVVIKEDGTQSLIIVPATPSDSGEWTVVAQNRAGRSSISVILTVEAVEHQVKPMFVEKLKNVNIKEGSRLEMKVRATGNPNPDIVWLKNSDIIVPHKYPKIRIEGTKGEAALKIDSTVSQDSAWYTATAINKAGRDTTRCKVNVEVEFAEPEPERKLIIPRGTYRAKEIAAPELEPLHLRYGQEQWEEGDLYDKEKQQKPFFKKKLTSLRLKRFGPAHFECRLTPIGDPTMVVEWLHDGKPLEAANRLRMINEFGYCSLDYGVAYSRDSGIITCRATNKYGTDHTSATLIVKDEKSLVEESQLPEGRKGLQRIEELERMAHEGALTGVTTDQKEKQKPDIVLYPEPVRVLEGETARFRCRVTGYPQPKVNWYLNGQLIRKSKRFRVRYDGIHYLDIVDCKSYDTGEVKVTAENPEGVIEHKVKLEIQQREDFRSVLRRAPEPRPEFHVHEPGKLQFEVQKVDRPVDTTETKEVVKLKRAERITHEKVPEESEELRSKFKRRTEEGYYEAITAVELKSRKKDESYEELLRKTKDELLHWTKELTEEEKKALAEEGKITIPTFKPDKIELSPSMEAPKIFERIQSQTVGQGSDAHFRVRVVGKPDPECEWYKNGVKIERSDRIYWYWPEDNVCELVIRDVTAEDSASIMVKAINIAGETSSHAFLLVQAKQLITFTQELQDVVAKEKDTMATFECETSEPFVKVKWYKDGMEVHEGDKYRMHSDRKVHFLSILTIDTSDAEDYSCVLVEDENVKTTAKLIVEGAVVEFVKELQDIEVPESYSGELECIVSPENIEGKWYHNDVELKSNGKYTITSRRGRQNLTVKDVTKEDQGEYSFVIDGKKTTCKLKMKPRPIAILQGLSDQKVCEGDIVQLEVKVSLESVEGVWMKDGQEVQPSDRVHIVIDKQSHMLLIEDMTKEDAGNYSFTIPALGLSTSGRVSVYSVDVITPLKDVNVIEGTKAVLECKVSVPDVTSVKWYLNDEQIKPDDRVQAIVKGTKQRLVINRTHASDEGPYKLIVGRVETNCNLSVEKIKIIRGLRDLTCTETQNVVFEVELSHSGIDVLWNFKDKEIKPSSKYKIEAHGKIYKLTVLNMMKDDEGKYTFYAGENMTSGKLTVAGGAISKPLTDQTVAESQEAVFECEVANPDSKGEWLRDGKHLPLTNNIRSESDGHKRRLIIAATKLDDIGEYTYKVATSKTSAKLKVEAVKIKKTLKNLTVTETQDAVFTVELTHPNVKGVQWIKNGVVLESNEKYAISVKGTIYSLRIKNCAIVDESVYGFRLGRLGASARLHVETVKIIKKPKDVTALENATVAFEVSVSHDTVPVKWFHKSVEIKPSDKHRLVSERKVHKLMLQNISPSDAGEYTAVVGQLECKAKLFVETLHITKTMKNIEVPETKTASFECEVSHFNVPSMWLKNGVEIEMSEKFKIVVQGKLHQLIIMNTSTEDSAEYTFVCGNDQVSATLTVTPIMITSMLKDINAEEKDTITFEVTVNYEGISYKWLKNGVEIKSTDKCQMRTKKLTHSLNIRNVHFGDAADYTFVAGKATSTATLYVEARHIEFRKHIKDIKVLEKKRAMFECEVSEPDITVQWMKDDQELQITDRIKIQKEKYVHRLLIPSTRMSDAGKYTVVAGGNVSTAKLFVEGRDVRIRSIKKEVQVIEKQRAVVEFEVNEDDVDAHWYKDGIEINFQVQERHKYVVERRIHRMFISETRQSDAGEYTFVAGRNRSSVTLYVNAPEPPQVLQELQPVTVQSGKPARFCAVISGRPQPKISWYKEEQLLSTGFKCKFLHDGQEYTLLLIEAFPEDAAVYTCEAKNDYGVATTSASLSVEVPEVVSPDQEMPVYPPAIITPLQDTVTSEGQPARFQCRVSGTDLKVSWYSKDKKIKPSRFFRMTQFEDTYQLEIAEAYPEDEGTYTFVASNAVGQVSSTANLSLEAPESILHERIEQEIEMEMKEFSSSFLSAEEEGLHSAELQLSKINETLELLSESPVYPTKFDSEKEGTGPIFIKEVSNADISMGDVATLSVTVIGIPKPKIQWFFNGVLLTPSADYKFVFDGDDHSLIILFTKLEDEGEYTCMASNDYGKTICSAYLKINSKGEGHKDTETESAVAKSLEKLGGPCPPHFLKELKPIRCAQGLPAIFEYTVVGEPAPTVTWFKENKQLCTSVYYTIIHNPNGSGTFIVNDPQREDSGLYICKAENMLGESTCAAELLVLLEDTDMTDTPCKAKSTPEAPEDFPQTPLKGPAVEALDSEQEIATFVKDTILKAALITEENQQLSYEHIAKANELSSQLPLGAQELQSILEQDKLTPESTREFLCINGSIHFQPLKEPSPNLQLQIVQSQKTFSKEGILMPEEPETQAVLSDTEKIFPSAMSIEQINSLTVEPLKTLLAEPEGNYPQSSIEPPMHSYLTSVAEEVLSPKEKTVSDTNREQRVTLQKQEAQSALILSQSLAEGHVESLQSPDVMISQVNYEPLVPSEHSCTEGGKILIESANPLENAGQDSAVRIEEGKSLRFPLALEEKQVLLKEEHSDNVVMPPDQIIESKREPVAIKKVQEVQGRDLLSKESLLSGIPEEQRLNLKIQICRALQAAVASEQPGLFSEWLRNIEKVEVEAVNITQEPRHIMCMYLVTSAKSVTEEVTIIIEDVDPQMANLKMELRDALCAIIYEEIDILTAEGPRIQQGAKTSLQEEMDSFSGSQKVEPITEPEVESKYLISTEEVSYFNVQSRVKYLDATPVTKGVASAVVSDEKQDESLKPSEEKEESSSESGTEEVATVKIQEAEGGLIKEDGPMIHTPLVDTVSEEGDIVHLTTSITNAKEVNWYFENKLVPSDEKFKCLQDQNTYTLVIDKVNTEDHQGEYVCEALNDSGKTATSAKLTVVKRAAPVIKRKIEPLEVALGHLAKFTCEIQSAPNVRFQWFKAGREIYESDKCSIRSSKYISSLEILRTQVVDCGEYTCKASNEYGSVSCTATLTVTEAYPPTFLSRPKSLTTFVGKAAKFICTVTGTPVIETIWQKDGAALSPSPNWRISDAENKHILELSNLTIQDRGVYSCKASNKFGADICQAELIIIDKPHFIKELEPVQSAINKKVHLECQVDEDRKVTVTWSKDGQKLPPGKDYKICFEDKIATLEIPLAKLKDSGTYVCTASNEAGSSSCSATVTVREPPSFVKKVDPSYLMLPGESARLHCKLKGSPVIQVTWFKNNKELSESNTVRMYFVNSEAILDITDVKVEDSGSYSCEAVNDVGSDSCSTEIVIKEPPSFIKTLEPADIVRGTNALLQCEVSGTGPFEISWFKDKKQIRSSKKYRLFSQKSLVCLEIFSFNSADVGEYECVVANEVGKCGCMATHLLKEPPTFVKKVDDLIALGGQTVTLQAAVRGSEPISVTWMKGQEVIREDGKIKMSFSNGVAVLIIPDVQISFGGKYTCLAENEAGSQTSVGELIVKEPAKIIERAELIQVTAGDPATLEYTVAGTPELKPKWYKDGRPLVASKKYRISFKNNVAQLKFYSAELHDSGQYTFEISNEVGSSSCETTFTVLDRDIAPFFTKPLRNVDSVVNGTCRLDCKIAGSLPMRVSWFKDGKEIAASDRYRIAFVEGTASLEIIRVDMNDAGNFTCRATNSVGSKDSSGALIVQEPPSFVTKPGSKDVLPGSAVCLKSTFQGSTPLTIRWFKGNKELVSGGSCYITKEALESSLELYLVKTSDSGTYTCKVSNVAGGVECSANLFVKEPATFVEKLEPSQLLKKGDATQLACKVTGTPPIKITWFANDREIKESSKHRMSFVESTAVLRLTDVGIEDSGEYMCEAQNEAGSDHCSSIVIVKESPYFTKEFKPIEVLKEYDVMLLAEVAGTPPFEITWFKDNTILRSGRKYKTFIQDHLVSLQILKFVAADAGEYQCRVTNEVGSSICSARVTLREPPSFIKKIESTSSLRGGTAAFQATLKGSLPITVTWLKDSDEITEDDNIRMTFENNVASLYLSGIEVKHDGKYVCQAKNDAGIQRCSALLSVKEPATITEEAVSIDVTQGDPATLQVKFSGTKEITAKWFKDGQELTLGSKYKISVTDTVSILKIISTEKKDSGEYTFEVQNDVGRSSCKARINVLDLIIPPSFTKKLKKMDSIKGSFIDLECIVAGSHPISIQWFKDDQEISASEKYKFSFHDNTAFLEISQLEGTDSGTYTCSATNKAGHNQCSGHLTVKEPPYFVEKPQSQDVNPNTRVQLKALVGGTAPMTIKWFKDNKELHSGAARSVWKDDTSTSLELFAAKATDSGTYICQLSNDVGTATSKATLFVKEPPQFIKKPSPVLVLRNGQSTTFECQITGTPKIRVSWYLDGNEITAIQKHGISFIDGLATFQISGARVENSGTYVCEARNDAGTASCSIELKVKEPPTFIRELKPVEVVKYSDVELECEVTGTPPFEVTWLKNNREIRSSKKYTLTDRVSVFNLHITKCDPSDTGEYQCIVSNEGGSCSCSTRVALKEPPSFIKKIENTTTVLKSSATFQSTVAGSPPISITWLKDDQILDEDDNVYISFVDSVATLQIRSVDNGHSGRYTCQAKNESGVERCYAFLLVQEPAQIVEKAKSVDVTEKDPMTLECVVAGTPELKVKWLKDGKQIVPSRYFSMSFENNVASFRIQSVMKQDSGQYTFKVENDFGSSSCDAYLRVLDQNIPPSFTKKLTKMDKVLGSSIHMECKVSGSLPISAQWFKDGKEISTSAKYRLVCHERSVSLEVNNLELEDTANYTCKVSNVAGDDACSGILTVKEPPSFLVKPGRQQAIPDSTVEFKAILKGTPPFKIKWFKDDVELVSGPKCFIGLEGSTSFLNLYSVDASKTGQYTCHVTNDVGSDSCTTMLLVTEPPKFVKKLEASKIVKAGDSSRLECKIAGSPEIRVVWFRNEHELPASDKYRMTFIDSVAVIQMNNLSTEDSGDFICEAQNPAGSTSCSTKVIVKEPPVFSSFPPIVETLKNAEVSLECELSGTPPFEVVWYKDKRQLRSSKKYKIASKNFHTSIHILNVDTSDIGEYHCKAQNEVGSDTCVCTVKLKEPPRFVSKLNSLTVVAGEPAELQASIEGAQPIFVQWLKEKEEVIRESENIRITFVENVATLQFAKAEPANAGKYICQIKNDGGMRENMATLMVLEPAVIVEKAGPMTVTVGETCTLECKVAGTPELSVEWYKDGKLLTSSQKHKFSFYNKISSLRILSVERQDAGTYTFQVQNNVGKSSCTAVVDVSDRAVPPSFTRRLKNTGGVLGASCILECKVAGSSPISVAWFHEKTKIVSGAKYQTTFSDNVCTLQLNSLDSSDMGNYTCVAANVAGSDECRAVLTVQEPPSFVKEPEPLEVLPGKNVTFTSVIRGTPPFKVNWFRGARELVKGDRCNIYFEDTVAELELFNIDISQSGEYTCVVSNNAGQASCTTRLFVKEPAAFLKRLSDHSVEPGKSIILESTYTGTLPISVTWKKDGFNITTSEKCNIVTTEKTCILEILNSTKRDAGQYSCEIENEAGRDVCGALVSTLEPPYFVTELEPLEAAVGDSVSLQCQVAGTPEITVSWYKGDTKLRPTPEYRTYFTNNVATLVFNKVNINDSGEYTCKAENSIGTASSKTVFRIQERQLPPSFARQLKDIEQTVGLPVTLTCRLNGSAPIQVCWYRDGVLLRDDENLQTSFVDNVATLKILQTDLSHSGQYSCSASNPLGTASSSARLTAREPKKSPFFDIKPVSIDVIAGESADFECHVTGAQPMRITWSKDNKEIRPGGNYTITCVGNTPHLRILKVGKGDSGQYTCQATNDVGKDMCSAQLSVKEPPKFVKKLEASKVAKQGESIQLECKISGSPEIKVSWFRNDSELHESWKYNMSFINSVALLTINEASAEDSGDYICEAHNGVGDASCSTALTVKAPPVFTQKPSPVGALKGSDVILQCEISGTPPFEVVWVKDRKQVRNSKKFKITSKHFDTSLHILNLEASDVGEYHCKATNEVGSDTCSCSVKFKEPPRFVKKLSDTSTLIGDAVELRAIVEGFQPISVVWLKDRGEVIRESENTRISFIDNIATLQLGSPEASNSGKYICQIKNDAGMRECSAVLTVLEPARIIEKPEPMTVTTGNPFALECVVTGTPELSAKWFKDGRELSADSKHHITFINKVASLKIPCAEMSDKGLYSFEVKNSVGKSNCTVSVHVSDRIVPPSFIRKLKDVNAILGASVVLECRVSGSAPISVGWFQDGNEIVSGPKCQSSFSENVCTLNLSLLEPSDTGIYTCVAANVAGSDECSAVLTVQEPPSFEQTPDSVEVLPGMSLTFTSVIRGTPPFKVKWFKGSRELVPGESCNISLEDFVTELELFEVQPLESGDYSCLVTNDAGSASCTTHLFVKEPATFVKRLADFSVETGSPIVLEATYTGTPPISVSWIKDEYLISQSERCSITMTEKSTILEILESTIEDYAQYSCLIENEAGQDICEALVSVLEPPYFIEPLEHVEAVIGEPATLQCKVDGTPEIRISWYKEHTKLRSAPAYKMQFKNNVASLVINKVDHSDVGEYSCKADNSVGAVASSAVLVIKARKLPPFFARKLKDVHETLGFPVAFECRINGSEPLQVSWYKDGVLLKDDANLQTSFVHNVATLQILQTDQSHIGQYNCSASNPLGTASSSAKLILSEHEVPPFFDLKPVSVDLALGESGTFKCHVTGTAPIKITWAKDNREIRPGGNYKMTLVENTATLTVLKVGKGDAGQYTCYASNIAGKDSCSAQLGVQEPPRFIKKLEPSRIVKQDEFTRYECKIGGSPEIKVLWYKDETEIQESSKFRMSFVDSVAVLEMHNLSVEDSGDYTCEAHNAAGSASSSTSLKVKEPPIFRKKPHPIETLKGADVHLECELQGTPPFHVSWYKDKRELRSGKKYKIMSENFLTSIHILNVDAADIGEYQCKATNDVGSDTCVGSIALKAPPRFVKKLSDISTVVGKEVQLQTTIEGAEPISVVWFKDKGEIVRESDNIWISYSENIATLQFSRVEPANAGKYTCQIKNDAGMQECFATLSVLEPATIVEKPESIKVTTGDTCTLECTVAGTPELSTKWFKDGKELTSDNKYKISFFNKVSGLKIINVAPSDSGVYSFEVQNPVGKDSCTASLQVSDRTVPPSFTRKLKETNGLSGSSVVMECKVYGSPPISVSWFHEGNEISSGRKYQTTLTDNTCALTVNMLEESDSGDYTCIATNMAGSDECSAPLTVREPPSFVQKPDPMDVLTGTNVTFTSIVKGTPPFSVSWFKGSSELVPGDRCNVSLEDSVAELELFDVDTSQSGEYTCIVSNEAGKASCTTHLYIKAPAKFVKRLNDYSIEKGKPLILEGTFTGTPPISVTWKKNGINVTPSQRCNITTTEKSAILEIPSSTVEDAGQYNCYIENASGKDSCSAQILILEPPYFVKQLEPVKVSVGDSASLQCQLAGTPEIGVSWYKGDTKLRPTTTYKMHFRNNVATLVFNQVDINDSGEYICKAENSVGEVSASTFLTVQEQKLPPSFSRQLRDVQETVGLPVVFDCAISGSEPISVSWYKDGKPLKDSPNVQTSFLDNTATLNIFKTDRSLAGQYSCTATNPIGSASSSARLILTEGKNPPFFDIRLAPVDAVVGESADFECHVTGTQPIKVSWAKDSREIRSGGKYQISYLENSAHLTVLKVDKGDSGQYTCYAVNEVGKDSCTAQLNIKERLIPPSFTKRLSETVEETEGNSFKLEGRVAGSQPITVAWYKNNIEIQPTSNCEITFKNNTLVLQVRKAGMNDAGLYTCKVSNDAGSALCTSSIVIKEPKKPPVFDQHLTPVTVSEGEYVQLSCHVQGSEPIRIQWLKAGREIKPSDRCSFSFASGTAVLELRDVAKADSGDYVCKASNVAGSDTTKSKVTIKDKPAVAPATKKAAVDGRLFFVSEPQSIRVVEKTTATFIAKVGGDPIPNVKWTKGKWRQLNQGGRVFIHQKGDEAKLEIRDTTKTDSGLYRCVAFNEHGEIESNVNLQVDERKKQEKIEGDLRAMLKKTPILKKGAGEEEEIDIMELLKNVDPKEYEKYARMYGITDFRGLLQAFELLKQSQEEETHRLEIEEIERSERDEKEFEELVSFIQQRLSQTEPVTLIKDIENQTVLKDNDAVFEIDIKINYPEIKLSWYKGTEKLEPSDKFEISIDGDRHTLRVKNCQLKDQGNYRLVCGPHIASAKLTVIEPAWERHLQDVTLKEGQTCTMTCQFSVPNVKSEWFRNGRILKPQGRHKTEVEHKVHKLTIADVRAEDQGQYTCKYEDLETSAELRIEAEPIQFTKRIQNIVVSEHQSATFECEVSFDDAIVTWYKGPTELTESQKYNFRNDGRCHYMTIHNVTPDDEGVYSVIARLEPRGEARSTAELYLTTKEIKLELKPPDIPDSRVPIPTMPIRAVPPEEIPPVVAPPIPLLLPTPEEKKPPPKRIEVTKKAVKKDAKKVVAKPKEMTPREEIVKKPPPPTTLIPAKAPEIIDVSSKAEEVKIMTITRKKEVQKEKEAVYEKKQAVHKEKRVFIESFEEPYDELEVEPYTEPFEQPYYEEPDEDYEEIKVEAKKEVHEEWEEDFEEGQEYYEREEGYDEGEEEWEEAYQEREVIQVQKEVYEESHERKVPAKVPEKKAPPPPKVIKKPVIEKIEKTSRRMEEEKVQVTKVPEVSKKIVPQKPSRTPVQEEVIEVKVPAVHTKKMVISEEKMFFASHTEEEVSVTVPEVQKEIVTEEKIHVAISKRVEPPPKVPELPEKPAPEEVAPVPIPKKVEPPAPKVPEVPKKPVPEEKKPVPVPKKEPAAPPKVPEVPKKPVPEEKIPVPVAKKKEAPPAKVPEVQKGVVTEEKITIVTQREESPPPAVPEIPKKKVPEERKPVPRKEEEVPPPPKVPALPKKPVPEEKVAVPVPVAKKAPPPRAEVSKKTVVEEKRFVAEEKLSFAVPQRVEVTRHEVSAEEEWSYSEEEEGVSISVYREEEREEEEEAEVTEYEVMEEPEEYVVEEKLHIISKRVEAEPAEVTERQEKKIVLKPKIPAKIEEPPPAKVPEAPKKIVPEKKVPAPVPKKEKVPPPKVPEEPKKPVPEKKVPPKVIKMEEPLPAKVTERHMQITQEEKVLVAVTKKEAPPKARVPEEPKRAVPEEKVLKLKPKREEEPPAKVTEFRKRVVKEEKVSIEAPKREPQPIKEVTIMEEKERAYTLEEEAVSVQREEEYEEYEEYDYKEFEEYEPTEEYDQYEEYEEREYERYEEHEEYITEPEKPIPVKPVPEEPVPTKPKAPPAKVLKKAVPEEKVPVPIPKKLKPPPPKVPEEPKKVFEEKIRISITKREKEQVTEPAAKVPMKPKRVVAEEKVPVPRKEVAPPVRVPEVPKELEPEEVAFEEEVVTHVEEYLVEEEEEYIHEEEEFITEEEVVPVIPVKVPEVPRKPVPEEKKPVPVPKKKEAPPAKVPEVPKKPEEKVPVLIPKKEKPPPAKVPEVPKKPVPEEKVPVPVPKKVEAPPAKVPEVPKKPVPEKKVPVPAPKKVEAPPAKVPEVPKKLIPEEKKPTPVPKKVEAPPPKVPKKREPVPVPVALPQEEEVLFEEEIVPEEEVLPEEEEVLPEEEEVLPEEEEVLPEEEEIPPEEEEVPPEEEYVPEEEEFVPEEEVLPEVKPKVPVPAPVPEIKKKVTEKKVVIPKKEEAPPAKVPEVPKKVEEKRIILPKEEEVLPVEVTEEPEEEPISEEEIPEEPPSIEEVEEVAPPRVPEVIKKAVPEAPTPVPKKVEAPPAKVSKKIPEEKVPVPVQKKEAPPAKVPEVPKKVPEKKVLVPKKEAVPPAKGRTVLEEKVSVAFRQEVVVKERLELEVVEAEVEEIPEEEEFHEVEEYFEEGEFHEVEEFIKLEQHRVEEEHRVEKVHRVIEVFEAEEVEVFEKPKAPPKGPEISEKIIPPKKPPTKVVPRKEPPAKVPEVPKKIVVEEKVRVPEEPRVPPTKVPEVLPPKEVVPEKKVPVPPAKKPEAPPPKVPEAPKEVVPEKKVPVPPPKKPEVPPTKVPEVPKAAVPEKKVPEAIPPKPESPPPEVPEAPKEVVPEKKVPAAPPKKPEVTPVKVPEAPKEVVPEKKVPVPPPKKPEVPPTKVPEVPKVAVPEKKVPEAIPPKPESPPPEVFEEPEEVALEEPPAEVVEEPEPAAPPQVTVPPKKPVPEKKAPAVVAKKPELPPVKVPEVPKEVVPEKKVPLVVPKKPEAPPAKVPEVPKEVVPEKKVAVPKKPEVPPAKVPEVPKKPVLEEKPAVPVPERAESPPPEVYEEPEEIAPEEEIAPEEEKPVPVAEEEEPEVPPPAVPEEPKKIIPEKKVPVIKKPEAPPPKEPEPEKVIEKPKLKPRPPPPPPAPPKEDVKEKIFQLKAIPKKKVPEKPQVPEKVELTPLKVPGGEKKVRKLLPERKPEPKEEVVLKSVLRKRPEEEEPKVEPKKLEKVKKPAVPEPPPPKPVEEVEVPTVTKRERKIPEPTKVPEIKPAIPLPAPEPKPKPEAEVKTIKPPPVEPEPTPIAAPVTVPVVGKKAEAKAPKEEAAKPKGPIKGVPKKTPSPIEAERRKLRPGSGGEKPPDEAPFTYQLKAVPLKFVKEIKDIILTESEFVGSSAIFECLVSPSTAITTWMKDGSNIRESPKHRFIADGKDRKLHIIDVQLSDAGEYTCVLRLGNKEKTSTAKLVVEELPVRFVKTLEEEVTVVKGQPLYLSCELNKERDVVWRKDGKIVVEKPGRIVPGVIGLMRALTINDADDTDAGTYTVTVENANNLECSSCVKVVEVIRDWLVKPIRDQHVKPKGTAIFACDIAKDTPNIKWFKGYDEIPAEPNDKTEILRDGNHLYLKIKNAMPEDIAEYAVEIEGKRYPAKLTLGEREVELLKPIEDVTIYEKESASFDAEISEADIPGQWKLKGELLRPSPTCEIKAEGGKRFLTLHKVKLDQAGEVLYQALNAITTAILTVKEIELDFAVPLKDVTVPERRQARFECVLTREANVIWSKGPDIIKSSDKFDIIADGKKHILVINDSQFDDEGVYTAEVEGKKTSARLFVTGIRLKFMSPLEDQTVKEGETATFVCELSHEKMHVVWFKNDAKLHTSRTVLISSEGKTHKLEMKEVTLDDISQIKAQVKELSSTAQLKVLEADPYFTVKLHDKTAVEKDEITLKCEVSKDVPVKWFKDGEEIVPSPKYSIKADGLRRILKIKKADLKDKGEYVCDCGTDKTKANVTVEARLIKVEKPLYGVEVFVGETAHFEIELSEPDVHGQWKLKGQPLTASPDCEIIEDGKKHILILHNCQLGMTGEVSFQAANAKSAANLKVKELPLIFITPLSDVKVFEKDEAKFECEVSREPKTFRWLKGTQEITGDDRFELIKDGTKHSMVIKSAAFEDEAKYMFEAEDKHTSGKLIIEGIRLKFLTPLKDVTAKEKESAVFTVELSHDNIRVKWFKNDQRLHTTRSVSMQDEGKTHSITFKDLSIDDTSQIRVEAMGMSSEAKLTVLEGDPYFTGKLQDYTGVEKDEVILQCEISKADAPVKWFKDGKEIKPSKNAVIKADGKKRMLILKKALKSDIGQYTCDCGTDKTSGKLDIEDREIKLVRPLHSVEVMETETARFETEISEDDIHANWKLKGEALLQTPDCEIKEEGKIHSLVLHNCRLDQTGGVDFQAANVKSSAHLRVKPRVIGLLRPLKDVTVTAGETATFDCELSYEDIPVEWYLKGKKLEPSDKVVPRSEGKVHTLTLRDVKLEDAGEVQLTAKDFKTHANLFVKEPPVEFTKPLEDQTVEEGATAVLECEVSRENAKVKWFKNGTEILKSKKYEIVADGRVRKLVIHDCTPEDIKTYTCDAKDFKTSCNLNVVPPHVEFLRPLTDLQVREKEMARFECELSRENAKVKWFKDGAEIKKGKKYDIISKGAVRILVINKCLLDDEAEYSCEVRTARTSGMLTVLEEEAVFTKNLANIEVSETDTIKLVCEVSKPGAEVIWYKGDEEIIETGRYEILTEGRKRILVIQNAHLEDAGNYNCRLPSSRTDGKVKVHELAAEFISKPQNLEILEGEKAEFVCSISKESFPVQWKRDDKTLESGDKYDVIADGKKRVLVVKDATLQDMGTYVVMVGAARAAAHLTVIEKLRIVVPLKDTRVKEQQEVVFNCEVNTEGAKAKWFRNEEAIFDSSKYIILQKDLVYTLRIRDAHLDDQANYNVSLTNHRGENVKSAANLIVEEEDLRIVEPLKDIETMEKKSVTFWCKVNRLNVTLKWTKNGEEVPFDNRVSYRVDKYKHMLTIKDCGFPDEGEYIVTAGQDKSVAELLIIEAPTEFVEHLEDQTVTEFDDAVFSCQLSREKANVKWYRNGREIKEGKKYKFEKDGSIHRLIIKDCRLDDECEYACGVEDRKSRARLFVEEIPVEIIRPPQDILEAPGADVVFLAELNKDKVEVQWLRNNMVVVQGDKHQMMSEGKIHRLQICDIKPRDQGEYRFIAKDKEARAKLELAAAPKIKTADQDLVVDVGKPLTMVVPYDAYPKAEAEWFKENEPLSTKTIDTTAEQTSFRILEAKKGDKGRYKIVLQNKHGKAEGFINLKVIDVPGPVRNLEVTETFDGEVSLAWEEPLTDGGSKIIGYVVERRDIKRKTWVLATDRAESCEFTVTGLQKGGVEYLFRVSARNRVGTGEPVETDNPVEARSKYDVPGPPLNVTITDVNRFGVSLTWEPPEYDGGAEITNYVIELRDKTSIRWDTAMTVRAEDLSATVTDVVEGQEYSFRVRAQNRIGVGKPSAATPFVKVADPIERPSPPVNLTSSDQTQSSVQLKWEPPLKDGGSPILGYIIERCEEGKDNWIRCNMKLVPELTYKVTGLEKGNKYLYRVSAENKAGVSDPSEILGPLTADDAFVEPTMDLSAFKDGLEVIVPNPITILVPSTGYPRPTATWCFGDKVLETGDRVKMKTLSAYAELVISPSERSDKGIYTLKLENRVKTISGEIDVNVIARPSAPKELKFGDITKDSVHLTWEPPDDDGGSPLTGYVVEKREVSRKTWTKVMDFVTDLEFTVPDLVQGKEYLFKVCARNKCGPGEPAYVDEPVNMSTPATVPDPPENVKWRDRTANSIFLTWDPPKNDGGSRIKGYIVERCPRGSDKWVACGEPVAETKMEVTGLEEGKWYAYRVKALNRQGASKPSRPTEEIQAVDTQEAPEIFLDVKLLAGLTVKAGTKIELPATVTGKPEPKITWTKADMILKQDKRITIENVPKKSTVTIVDSKRSDTGTYIIEAVNVCGRATAVVEVNVLDKPGPPAAFDITDVTNESCLLTWNPPRDDGGSKITNYVVERRATDSEVWHKLSSTVKDTNFKATKLIPNKEYIFRVAAENMYGVGEPVQASPITAKYQFDPPGPPTRLEPSDITKDAVTLTWCEPDDDGGSPITGYWVERLDPDTDKWVRCNKMPVKDTTYRVKGLTNKKKYRFRVLAENLAGPGKPSKSTEPILIKDPIDPPWPPGKPTVKDVGKTSVRLNWTKPEHDGGAKIESYVIEMLKTGTDEWVRVAEGVPTTQHLLPGLMEGQEYSFRVRAVNKAGESEPSEPSDPVLCREKLYPPSPPRWLEVINITKNTADLKWTVPEKDGGSPITNYIVEKRDVRRKGWQTVDTTVKDTKCTVTPLTEGSLYVFRVAAENAIGQSDYTEIEDSVLAKDTFTTPGPPYALAVVDVTKRHVDLKWEPPKNDGGRPIQRYVIEKKERLGTRWVKAGKTAGPDCNFRVTDVIEGTEVQFQVRAENEAGVGHPSEPTEILSIEDPTSPPSPPLDLHVTDAGRKHIAIAWKPPEKNGGSPIIGYHVEMCPVGTEKWMRVNSRPIKDLKFKVEEGVVPDKEYVLRVRAVNAIGVSEPSEISENVVAKDPDCKPTIDLETHDIIVIEGEKLSIPVPFRAVPVPTVSWHKDGKEVKASDRLTMKNDHISAHLEVPKSVRADAGIYTITLENKLGSATASINVKVIGLPGPCKDIKASDITKSSCKLTWEPPEFDGGTPILHYVLERREAGRRTYIPVMSGENKLSWTVKDLIPNGEYFFRVKAVNKVGGGEYIELKNPVIAQDPKQPPDPPVDVEVHNPTAEAMTITWKPPLYDGGSKIMGYIIEKIAKGEERWKRCNEHLVPILTYTAKGLEEGKEYQFRVRAENAAGISEPSRATPPTKAVDPIDAPKVILRTSLEVKRGDEIALDASISGSPYPTITWIKDENVIVPEEIKKRAAPLVRRRKGEVQEEEPFVLPLTQRLSIDNSKKGESQLRVRDSLRPDHGLYMIKVENDHGIAKAPCTVSVLDTPGPPINFVFEDIRKTSVLCKWEPPLDDGGSEIINYTLEKKDKTKPDSEWIVVTSTLRHCKYSVTKLIEGKEYLFRVRAENRFGPGPPCVSKPLVAKDPFGPPDAPDKPIVEDVTSNSMLVKWNEPKDNGSPILGYWLEKREVNSTHWSRVNKSLLNALKANVDGLLEGLTYVFRVCAENAAGPGKFSPPSDPKTAHDPISPPGPPIPRVTDTSSTTIELEWEPPAFNGGGEIVGYFVDKQLVGTNEWSRCTEKMIKVRQYTVKEIREGADYKLRVSAVNAAGEGPPGETQPVTVAEPQEPPAVELDVSVKGGIQIMAGKTLRIPAVVTGRPVPTKVWTKEEGELDKDRVVIDNVGTKSELIIKDALRKDHGRYVITATNSCGSKFAAARVEVFDVPGPVLDLKPVVTNRKMCLLNWSDPEDDGGSEITGFIIERKDAKMHTWRQPIETERSKCDITGLLEGQEYKFRVIAKNKFGCGPPVEIGPILAVDPLGPPTSPERLTYTERTKSTITLDWKEPRSNGGSPIQGYIIEKRRHDKPDFERVNKRLCPTTSFLVENLDEHQMYEFRVKAVNEIGESEPSLPLNVVIQDDEVPPTIKLRLSVRGDTIKVKAGEPVHIPADVTGLPMPKIEWSKNETVIEKPTDALQITKEEVSRSEAKTELSIPKAVREDKGTYTVTASNRLGSVFRNVHVEVYDRPSPPRNLAVTDIKAESCYLTWDAPLDNGGSEITHYVIDKRDASRKKAEWEEVTNTAVEKRYGIWKLIPNGQYEFRVRAVNKYGISDECKSDKVVIQDPYRLPGPPGKPKVLARTKGSMLVSWTPPLDNGGSPITGYWLEKREEGSPYWSRVSRAPITKVGLKGVEFNVPRLLEGVKYQFRAMAINAAGIGPPSEPSDPEVAGDPIFPPGPPSCPEVKDKTKSSISLGWKPPAKDGGSPIKGYIVEMQEEGTTDWKRVNEPDKLITTCECVVPNLKELRKYRFRVKAVNEAGESEPSDTTGEIPATDIQEEPEVFIDIGAQDCLVCKAGSQIRIPAVIKGRPTPKSSWEFDGKAKKAMKDGVHDIPEDAQLETAENSSVIIIPECKRSHTGKYSITAKNKAGQKTANCRVKVMDVPGPPKDLKVSDITRGSCRLSWKMPDDDGGDRIKGYVIEKRTIDGKAWTKVNPDCGSTTFVVPDLLSEQQYFFRVRAENRFGIGPPVETIQRTTARDPIYPPDPPIKLKIGLITKNTVHLSWKPPKNDGGSPVTHYIVECLAWDPTGTKKEAWRQCNKRDVEELQFTVEDLVEGGEYEFRVKAVNAAGVSKPSATVGPVTVKDQTCPPSIDLKEFMEVEEGTNVNIVAKIKGVPFPTLTWFKAPPKKPDNKEPVLYDTHVNKLVVDDTCTLVIPQSRRSDTGLYTITAVNNLGTASKEMRLNVLGRPGPPVGPIKFESVSADQMTLSWFPPKDDGGSKITNYVIEKREANRKTWVHVSSEPKECTYTIPKLLEGHEYVFRIMAQNKYGIGEPLDSEPETARNLFSVPGAPDKPTVSSVTRNSMTVNWEEPEYDGGSPVTGYWLEMKDTTSKRWKRVNRDPIKAMTLGVSYKVTGLIEGSDYQFRVYAINAAGVGPASLPSDPATARDPIAPPGPPFPKVTDWTKSSADLEWSPPLKDGGSKVTGYIVEYKEEGKEEWEKGKDKEVRGTKLVVTGLKEGAFYKFRVRAVNIAGIGEPGEVTDVIEMKDRLVSPDLQLDASVRDRIVVHAGGVIRIIAYVSGKPPPTVTWNMNERTLPQEATIETTAISSSMVIKNCQRSHQGVYSLLAKNEAGERKKTIIVDVLDVPGPVGTPFLAHNLTNESCKLTWFSPEDDGGSPITNYVIEKRESDRRAWTPVTYTVTRQNATVQGLIQGKAYFFRIAAENSIGMGPFVETSEALVIREPITVPERPEDLEVKEVTKNTVTLTWNPPKYDGGSEIINYVLESRLIGTEKFHKVTNDNLLSRKYTVKGLKEGDTYEYRVSAVNIVGQGKPSFCTKPITCKDELAPPTLHLDFRDKLTIRVGEAFALTGRYSGKPKPKVSWFKDEADVLEDDRTHIKTTPATLALEKIKAKRSDSGKYCVVVENSTGSRKGFCQVNVVDRPGPPVGPVSFDEVTKDYMVISWKPPLDDGGSKITNYIIEKKEVGKDVWMPVTSASAKTTCKVSKLLEGKDYIFRIHAENLYGISDPLVSDSMKAKDRFRVPDAPDQPIVTEVTKDSALVTWNKPHDGGKPITNYILEKRETMSKRWARVTKDPIHPYTKFRVPDLLEGCQYEFRVSAENEIGIGDPSPPSKPVFAKDPIAKPSPPVNPEAIDTTCNSVDLTWQPPRHDGGSKILGYIVEYQKVGDEEWRRANHTPESCPETKYKVTGLRDGQTYKFRVLAVNAAGESDPAHVPEPVLVKDRLEPPELILDANMAREQHIKVGDTLRLSAIIKGVPFPKVTWKKEDRDAPTKARIDVTPVGSKLEIRNAAHEDGGIYSLTVENPAGSKTVSVKVLVLDKPGPPRDLEVSEIRKDSCYLTWKEPLDDGGSVITNYVVERRDVASAQWSPLSATSKKKSHFAKHLNEGNQYLFRVAAENQYGRGPFVETPKPIKALDPLHPPGPPKDLHHVDVDKTEVSLVWNKPDRDGGSPITGYLVEYQEEGTQDWIKFKTVTNLECVVTGLQQGKTYRFRVKAENIVGLGLPDTTIPIECQEKLVPPSVELDVKLIEGLVVKAGTTVRFPAIIRGVPVPTAKWTTDGSEIKTDEHYTVETDNFSSVLTIKNCLRRDTGEYQITVSNAAGSKTVAVHLTVLDVPGPPTGPINILDVTPEHMTISWQPPKDDGGSPVINYIVEKQDTRKDTWGVVSSGSSKTKLKIPHLQKGCEYVFRVRAENKIGVGPPLDSTPTVAKHKFSPPSPPGKPVVTDITENAATVSWTLPKSDGGSPITGYYMERREVTGKWVRVNKTPIADLKFRVTGLYEGNTYEFRVFAENLAGLSKPSPSSDPIKACRPIKPPGPPINPKLKDKSRETADLVWTKPLSDGGSPILGYVVECQKPGTAQWNRINKDELIRQCAFRVPGLIEGNEYRFRIKAANIVGEGEPRELAESVIAKDILHPPEVELDVTCRDVITVRVGQTIRILARVKGRPEPDITWTKEGKVLVREKRVDLIQDLPRVELQIKEAVRADHGKYIISAKNSSGHAQGSAIVNVLDRPGPCQNLKVTNVTKENCTISWENPLDNGGSEITNFIVEYRKPNQKGWSIVASDVTKRLIKANLLANNEYYFRVCAENKVGVGPTIETKTPILAINPIDRPGEPENLHIADKGKTFVYLKWRRPDYDGGSPNLSYHVERRLKGSDDWERVHKGSIKETHYMVDRCVENQIYEFRVQTKNEGGESDWVKTEEVVVKEDLQKPVLDLKLSGVLTVKAGDTIRLEAGVRGKPFPEVAWTKDKDATDLTRSPRVKIDTRADSSKFSLTKAKRSDGGKYVVTATNTAGSFVAYATVNVLDKPGPVRNLKIVDVSSDRCTVCWDPPEDDGGCEIQNYILEKCETKRMVWSTYSATVLTPGTTVTRLIEGNEYIFRVRAENKIGTGPPTESKPVIAKTKYDKPGRPDPPEVTKVSKEEMTVVWNPPEYDGGKSITGYFLEKKEKHSTRWVPVNKSAIPERRMKVQNLLPDHEYQFRVKAENEIGIGEPSLPSRPVVAKDPIEPPGPPTNFRVVDTTKHSITLGWGKPVYDGGAPIIGYVVEMRPKIADASPDEGWKRCNAAAQLVRKEFTVTSLDENQEYEFRVCAQNQVGIGRPAELKEAIKPKEILEPPEIDLDASMRKLVIVRAGCPIRLFAIVRGRPAPKVTWRKVGIDNVVRKGQVDLVDTMAFLVIPNSTRDDSGKYSLTLVNPAGEKAVFVNVRVLDTPGPVSDLKVSDVTKTSCHVSWAPPENDGGSQVTHYIVEKREADRKTWSTVTPEVKKTSFHVTNLVPGNEYYFRVTAVNEYGPGVPTDVPKPVLASDPLSEPDPPRKLEVTEMTKNSATLAWLPPLRDGGAKIDGYITSYREEEQPADRWTEYSVVKDLSLVVTGLKEGKKYKFRVAARNAVGVSLPREAEGVYEAKEQLLPPKILMPEQITIKAGKKLRIEAHVYGKPHPTCKWKKGEDEVVTSSHLAVHKADSSSILIIKDVTRKDSGYYSLTAENSSGTDTQKIKVVVMDAPGPPQPPFDISDIDADACSLSWHIPLEDGGSNITNYIVEKCDVSRGDWVTALASVTKTSCRVGKLIPGQEYIFRVRAENRFGISEPLTSPKMVAQFPFGVPSEPKNARVTKVNKDCIFVAWDRPDSDGGSPIIGYLIERKERNSLLWVKANDTLVRSTEYPCAGLVEGLEYSFRIYALNKAGSSPPSKPTEYVTARMPVDPPGKPEVIDVTKSTVSLIWARPKHDGGSKIIGYFVEACKLPGDKWVRCNTAPHQIPQEEYTATGLEEKAQYQFRAIARTAVNISPPSEPSDPVTILAENVPPRIDLSVAMKSLLTVKAGTNVCLDATVFGKPMPTVSWKKDGTLLKPAEGIKMAMQRNLCTLELFSVNRKDSGDYTITAENSSGSKSATIKLKVLDKPGPPASVKINKMYSDRAMLSWEPPLEDGGSEITNYIVDKRETSRPNWAQVSATVPITSCSVEKLIEGHEYQFRICAENKYGVGDPVFTEPAIAKNPYDPPGRCDPPVISNITKDHMTVSWKPPADDGGSPITGYLLEKRETQAVNWTKVNRKPIIERTLKATGLQEGTEYEFRVTAINKAGPGKPSDASKAAYARDPQYPPGPPAFPKVYDTTRSSVSLSWGKPAYDGGSPIIGYLVEVKRADSDNWVRCNLPQNLQKTRFEVTGLMEDTQYQFRVYAVNKIGYSDPSDVPDKHYPKDILIPPEGELDADLRKTLILRAGVTMRLYVPVKGRPPPKITWSKPNVNLRDRIGLDIKSTDFDTFLRCENVNKYDAGKYILTLENSCGKKEYTIVVKVLDTPGPPVNVTVKEISKDSAYVTWEPPIIDGGSPIINYVVQKRDAERKSWSTVTTECSKTSFRVANLEEGKSYFFRVFAENEYGIGDPGETRDAVKASQTPGPVVDLKVRSVSKSSCSIGWKKPHSDGGSRIIGYVVDFLTEENKWQRVMKSLSLQYSAKDLTEGKEYTFRVSAENENGEGTPSEITVVARDDVVAPDLDLKGLPDLCYLAKENSNFRLKIPIKGKPAPSVSWKKGEDPLATDTRVSVESSAVNTTLIVYDCQKSDAGKYTITLKNVAGTKEGTISIKVVGKPGIPTGPIKFDEVTAEAMTLKWAPPKDDGGSEITNYILEKRDSVNNKWVTCASAVQKTTFRVTRLHEGMEYTFRVSAENKYGVGEGLKSEPIVARHPFDVPDAPPPPNIVDVRHDSVSLTWTDPKKTGGSPITGYHLEFKERNSLLWKRANKTPIRMRDFKVTGLTEGLEYEFRVMAINLAGVGKPSLPSEPVVALDPIDPPGKPEVINITRNSVTLIWTEPKYDGGHKLTGYIVEKRDLPSKSWMKANHVNVPECAFTVTDLVEGGKYEFRIRAKNTAGAISAPSESTETIICKDEYEAPTIVLDPTIKDGLTIKAGDTIVLNAISILGKPLPKSSWSKAGKDIRPSDITQITSTPTSSMLTIKYATRKDAGEYTITATNPFGTKVEHVKVTVLDVPGPPGPVEISNVSAEKATLTWTPPLEDGGSPIKSYILEKRETSRLLWTVVSEDIQSCRHVATKLIQGNEYIFRVSAVNHYGKGEPVQSEPVKMVDRFGPPGPPEKPEVSNVTKNTATVSWKRPVDDGGSEITGYHVERREKKSLRWVRAIKTPVSDLRCKVTGLQEGSTYEFRVSAENRAGIGPPSEASDSVLMKDAAYPPGPPSNPHVTDTTKKSASLAWGKPHYDGGLEITGYVVEHQKVGDEAWIKDTTGTALRITQFVVPDLQTKEKYNFRISAINDAGVGEPAVIPDVEIVEREMAPDFELDAELRRTLVVRAGLSIRIFVPIKGRPAPEVTWTKDNINLKNRANIENTESFTLLIIPECNRYDTGKFVMTIENPAGKKSGFVNVRVLDTPGPVLNLRPTDITKDSVTLHWDLPLIDGGSRITNYIVEKREATRKSYSTATTKCHKCTYKVTGLSEGCEYFFRVMAENEYGIGEPTETTEPVKASEAPSPPDSLNIMDITKSTVSLAWPKPKHDGGSKITGYVIEAQRKGSDQWTHITTVKGLECVVRNLTEGEEYTFQVMAVNSAGRSAPRESRPVIVKEQTMLPELDLRGIYQKLVIAKAGDNIKVEIPVLGRPKPTVTWKKGDQILKQTQRVNFETTATSTILNINECVRSDSGPYPLTARNIVGEVGDVITIQVHDIPGPPTGPIKFDEVSSDFVTFSWDPPENDGGVPISNYVVEMRQTDSTTWVELATTVIRTTYKATRLTTGLEYQFRVKAQNRYGVGPGITSACIVANYPFKVPGPPGTPQVTAVTKDSMTISWHEPLSDGGSPILGYHVERKERNGILWQTVSKALVPGNIFKSSGLTDGIAYEFRVIAENMAGKSKPSKPSEPMLALDPIDPPGKPVPLNITRHTVTLKWAKPEYTGGFKITSYIVEKRDLPNGRWLKANFSNILENEFTVSGLTEDAAYEFRVIAKNAAGAISPPSEPSDAITCRDDVEAPKIKVDVKFKDTVILKAGEAFRLEADVSGRPPPTMEWSKDGKELEGTAKLEIKIADFSTNLVNKDSTRRDSGAYTLTATNPGGFAKHIFNVKVLDRPGPPEGPLAVTEVTSEKCVLSWFPPLDDGGAKIDHYIVQKRETSRLAWTNVASEVQVTKLKVTKLLKGNEYIFRVMAVNKYGVGEPLESEPVLAVNPYGPPDPPKNPEVTTITKDSMVVCWGHPDSDGGSEIINYIVERRDKAGQRWIKCNKKTLTDLRYKVSGLTEGHEYEFRIMAENAAGISAPSPTSPFYKACDTVFKPGPPGNPRVLDTSRSSISIAWNKPIYDGGSEITGYMVEIALPEEDEWQIVTPPAGLKATSYTITGLTENQEYKIRIYAMNSEGLGEPALVPGTPKAEDRMLPPEIELDADLRKVVTIRACCTLRLFVPIKGRPAPEVKWARDHGESLDKASIESTSSYTLLIVGNVNRFDSGKYILTVENSSGSKSAFVNVRVLDTPGPPQDLKVKEVTKTSVTLTWDPPLLDGGSKIKNYIVEKRESTRKAYSTVATNCHKTSWKVDQLQEGCSYYFRVLAENEYGIGLPAETAESVKASERPLPPGKITLMDVTRNSVSLSWEKPEHDGGSRILGYIVEMQTKGSDKWATCATVKVTEATITGLIQGEEYSFRVSAQNEKGISDPRQLSVPVIAKDLVIPPAFKLLFNTFTVLAGEDLKVDVPFIGRPTPAVTWHKDNVPLKQTTRVNAESTENNSLLTIKDACREDVGHYVVKLTNSAGEAIETLNVIVLDKPGPPTGPVKMDEVTADSITLSWGPPKYDGGSSINNYIVEKRDTSTTTWQIVSATVARTTIKACRLKTGCEYQFRIAAENRYGKSTYLNSEPTVAQYPFKVPGPPGTPVVTLSSRDSMEVQWNEPISDGGSRVIGYHLERKERNSILWVKLNKTPIPQTKFKTTGLEEGVEYEFRVSAENIVGIGKPSKVSECYVARDPCDPPGRPEAIIVTRNSVTLQWKKPTYDGGSKITGYIVEKKELPEGRWMKASFTNIIDTHFEVTGLVEDHRYEFRVIARNAAGVFSEPSESTGAITARDEVDPPRISMDPKYKDTIVVHAGESFKVDADIYGKPIPTIQWIKGDQELSNTARLEIKSTDFATSLSVKDAVRVDSGNYILKAKNVAGERSVTVNVKVLDRPGPPEGPVVISGVTAEKCTLAWKPPLQDGGSDIINYIVERRETSRLVWTVVDANVQTLSCKVTKLLEGNEYTFRIMAVNKYGVGEPLESEPVVAKNPFVVPDAPKAPEVTTVTKDSMIVVWERPASDGGSEILGYVLEKRDKEGIRWTRCHKRLIGELRLRVTGLIENHDYEFRVSAENAAGLSEPSPPSAYQKACDPIYKPGPPNNPKVIDITRSSVFLSWSKPIYDGGCEIQGYIVEKCDVSVGEWTMCTPPTGINKTNIEVEKLLEKHEYNFRICAINKAGVGEHADVPGPIIVEEKLEAPDIDLDLELRKIINIRAGGSLRLFVPIKGRPTPEVKWGKVDGEIRDAAIIDVTSSFTSLVLDNVNRYDSGKYTLTLENSSGTKSAFVTVRVLDTPSPPVNLKVTEITKDSVSITWEPPLLDGGSKIKNYIVEKREATRKSYAAVVTNCHKNSWKIDQLQEGCSYYFRVTAENEYGIGLPAQTADPIKVAEVPQPPGKITVDDVTRNSVSLSWTKPEHDGGSKIIQYIVEMQAKHSEKWSECARVKSLQAVITNLTQGEEYLFRVVAVNEKGRSDPRSLAVPIVAKDLVIEPDVKPAFSSYSVQVGQDLKIEVPISGRPKPTITWTKDGLPLKQTTRINVTDSLDLTTLSIKETHKDDGGQYGITVANVVGQKTASIEIVTLDKPDPPKGPVKFDDVSAESITLSWNPPLYTGGCQITNYIVQKRDTTTTVWDVVSATVARTTLKVTKLKTGTEYQFRIFAENRYGQSFALESDPIVAQYPYKEPGPPGTPFATAISKDSMVIQWHEPVNNGGSPVIGYHLERKERNSILWTKVNKTIIHDTQFKAQNLEEGIEYEFRVYAENIVGVGKASKNSECYVARDPCDPPGTPEPIMVKRNEITLQWTKPVYDGGSMITGYIVEKRDLPDGRWMKASFTNVIETQFTVSGLTEDQRYEFRVIAKNAAGAISKPSDSTGPITAKDEVELPRISMDPKFRDTIVVNAGETFRLEADVHGKPLPTIEWLRGDKEIEESARCEIKNTDFKALLIVKDAIRIDGGQYILRASNVAGSKSFPVNVKVLDRPGPPEGPVQVTGVTSEKCSLTWSPPLQDGGSDISHYVVEKRETSRLAWTVVASEVVTNSLKVTKLLEGNEYVFRIMAVNKYGVGEPLESAPVLMKNPFVLPGPPKSLEVTNIAKDSMTVCWNRPDSDGGSEIIGYIVEKRDRSGIRWIKCNKRRITDLRLRVTGLTEDHEYEFRVSAENAAGVGEPSPATVYYKACDPVFKPGPPTNAHIVDTTKNSITLAWGKPIYDGGSEILGYVVEICKADEEEWQIVTPQTGLRVTRFEISKLTEHQEYKIRVCALNKVGLGEATSVPGTVKPEDKLEAPELDLDSELRKGIVVRAGGSARIHIPFKGRPTPEITWSREEGEFTDKVQIEKGVNYTQLSIDNCDRNDAGKYILKLENSSGSKSAFVTVKVLDTPGPPQNLAVKEVRKDSAFLVWEPPIIDGGAKVKNYVIDKRESTRKAYANVSSKCSKTSFKVENLTEGAIYYFRVMAENEFGVGVPVETVDAVKAAEPPSPPGKVTLTDVSQTSASLMWEKPEHDGGSRVLGYVVEMQPKGTEKWSIVAESKVCNAVVTGLSSGQEYQFRVKAYNEKGKSDPRVLGVPVIAKDLTIQPSLKLPFNTYSIQAGEDLKIEIPVIGRPRPNISWVKDGEPLKQTTRVNVEETATSTVLHIKEGNKDDFGKYTVTATNSAGTATENLSVIVLEKPGPPVGPVRFDEVSADFVVISWEPPAYTGGCQISNYIVEKRDTTTTTWHMVSATVARTTIKITKLKTGTEYQFRIFAENRYGKSAPLDSKAVIVQYPFKEPGPPGTPFVTSISKDQMLVQWHEPVNDGGTKIIGYHLEQKEKNSILWVKLNKTPIQDTKFKTTGLDEGLEYEFKVSAENIVGIGKPSKVSECFVARDPCDPPGRPEAIVITRNNVTLKWKKPAYDGGSKITGYIVEKKDLPDGRWMKASFTNVLETEFTVSGLVEDQRYEFRVIARNAAGNFSEPSDSSGAITARDEIDAPNASLDPKYKDVIVVHAGETFVLEADIRGKPIPDVVWSKDGKELEETAARMEIKSTIQKTTLVVKDCIRTDGGQYILKLSNVGGTKSIPITVKVLDRPGPPEGPLKVTGVTAEKCYLAWNPPLQDGGANISHYIIEKRETSRLSWTQVSTEVQALNYKVTKLLPGNEYIFRVMAVNKYGIGEPLESGPVTACNPYKPPGPPSTPEVSAITKDSMVVTWARPVDDGGTEIEGYILEKRDKEGVRWTKCNKKTLTDLRLRVTGLTEGHSYEFRVAAENAAGVGEPSEPSVFYRACDALYPPGPPSNPKVTDTSRSSVSLAWSKPIYDGGAPVKGYVVEVKEAAADEWTTCTPPTGLQGKQFTVTKLKENTEYNFRICAINSEGVGEPATLPGSVVAQERIEPPEIELDADLRKVVVLRASATLRLFVTIKGRPEPEVKWEKAEGILTDRAQIEVTSSFTMLVIDNVTRFDSGRYNLTLENNSGSKTAFVNVRVLDSPSAPVNLTIREVKKDSVTLSWEPPLIDGGAKITNYIVEKRETTRKAYATITNNCTKTTFRIENLQEGCSYYFRVLASNEYGIGLPAETTEPVKVSEPPLPPGRVTLVDVTRNTATIKWEKPESDGGSKITGYVVEMQTKGSEKWSTCTQVKTLEATISGLTAGEEYVFRVAAVNEKGRSDPRQLGVPVIARDIEIKPSVELPFHTFNVKAREQLKIDVPFKGRPQATVNWRKDGQTLKETTRVNVSSSKTVTSLSIKEASKEDVGTYELCVSNSAGSITVPITIIVLDRPGPPGPIRIDEVSCDSITISWNPPEYDGGCQISNYIVEKKETTSTTWHIVSQAVARTSIKIVRLTTGSEYQFRVCAENRYGKSSYSESSAVVAEYPFSPPGPPGTPKVVHATKSTMLVTWQVPVNDGGSRVIGYHLEYKERSSILWSKANKILIADTQMKVSGLDEGLMYEYRVYAENIAGIGKCSKSCEPVPARDPCDPPGQPEVTNITRKSVSLKWSKPHYDGGAKITGYIVERRELPDGRWLKCNYTNIQETYFEVTELTEDQRYEFRVFARNAADSVSEPSESTGPIIVKDDVEPPRVMMDVKFRDVIVVKAGEVLKINADIAGRPLPVISWAKDGIEIEERARTEIISTDNHTLLTVKDCIRRDTGQYVLTLKNVAGTRSVAVNCKVLDKPGPPAGPLEINGLTAEKCSLSWGRPQEDGGADIDYYIVEKRETSHLAWTICEGELQMTSCKVTKLLKGNEYIFRVTGVNKYGVGEPLESVAIKALDPFTVPSPPTSLEITSVTKESMTLCWSRPESDGGSEISGYIIERREKNSLRWVRVNKKPVYDLRVKSTGLREGCEYEYRVYAENAAGLSLPSETSPLIRAEDPVFLPSPPSKPKIVDSGKTTITIAWVKPLFDGGAPITGYTVEYKKSDDTDWKTSIQSLRGTEYTISGLTTGAEYVFRVKSVNKVGASDPSDSSDPQIAKEREEEPLFDIDSEMRKTLIVKAGASFTMTVPFRGRPVPNVLWSKPDTDLRTRAYVDTTDSRTSLTIENANRNDSGKYTLTIQNVLSAASLTLVVKVLDTPGPPTNITVQDVTKESAVLSWDVPENDGGAPVKNYHIEKREASKKAWVSVTNNCNRLSYKVTNLQEGAIYYFRVSGENEFGVGIPAETKEGVKITEKPSPPEKLGVTSISKDSVSLTWLKPEHDGGSRIVHYVVEALEKGQKNWVKCAVAKSTHHVVSGLRENSEYFFRVFAENQAGLSDPRELLLPVLIKEQLEPPEIDMKNFPSHTVYVRAGSNLKVDIPISGKPLPKVTLSRDGVPLKATMRFNTEITAENLTINLKESVTADAGRYEITAANSSGTTKAFINIVVLDRPGPPTGPVVISDITEESVTLKWEPPKYDGGSQVTNYILLKRETSTAVWTEVSATVARTMMKVMKLTTGEEYQFRIKAENRFGISDHIDSACVTVKLPYTTPGPPSTPWVTNVTRESITVGWHEPVSNGGSAVVGYHLEMKDRNSILWQKANKLVIRTTHFKVTTISAGLIYEFRVYAENAAGVGKPSHPSEPVLAIDACEPPRNVRITDISKNSVSLSWQQPAFDGGSKITGYIVERRDLPDGRWTKASFTNVTETQFIISGLTQNSQYEFRVFARNAVGSISNPSEVVGPITCIDSYGGPVIDLPLEYTEVVKYRAGTSVKLRAGISGKPAPTIEWYKDDKELQTNALVCVENTTDLASILIKDADRLNSGCYELKLRNAMGSASATIRVQILDKPGPPGGPIEFKTVTAEKITLLWRPPADDGGAKITHYIVEKRETSRVVWSMVSEHLEECIITTTKIIKGNEYIFRVRAVNKYGIGEPLESDSVVAKNAFVTPGPPGIPEVTKITKNSMTVVWSRPIADGGSDISGYFLEKRDKKSLGWFKVLKETIRDTRQKVTGLTENSDYQYRVCAVNAAGQGPFSEPSEFYKAADPIDPPGPPAKIRIADSTKSSITLGWSKPVYDGGSAVTGYVVEIRQGEEEEWTTVSTKGEVRTTEYVVSNLKPGVNYYFRVSAVNCAGQGEPIEMNEPVQAKDILEAPEIDLDVALRTSVIAKAGEDVQVLIPFKGRPPPTVTWRKDEKNLGSDARYSIENTDSSSLLTIPQVTRNDTGKYILTIENGVGEPKSSTVSVKVLDTPAACQKLQVKHVSRGTVTLLWDPPLIDGGSPIINYVIEKRDATKRTWSVVSHKCSSTSFKLIDLSEKTPFFFRVLAENEIGIGEPCETTEPVKAAEVPAPIRDLSMKDSTKTSVILSWTKPDFDGGSVITEYVVERKGKGEQTWSHAGISKTCEIEVSQLKEQSVLEFRVFAKNEKGLSDPVTIGPITVKELIITPEVDLSDIPGAQVTVRIGHNVHLELPYKGKPKPSISWLKDGLPLKESEFVRFSKTENKITLSIKNAKKEHGGKYTVILDNAVCRIAVPITVITLGPPSKPKGPIRFDEIKADSVILSWDVPEDNGGGEITCYSIEKRETSQTNWKMVCSSVARTTFKVPNLVKDAEYQFRVRAENRYGVSQPLVSSIIVAKHQFRIPGPPGKPVIYNVTSDGMSLTWDAPVYDGGSEVTGFHVEKKERNSILWQKVNTSPISGREYRATGLVEGLDYQFRVYAENSAGLSSPSDPSKFTLAVSPVDPPGTPDYIDVTRETITLKWNPPLRDGGSKIVGYSIEKRQGNERWVRCNFTDVSECQYTVTGLSPGDRYEFRIIARNAVGTISPPSQSSGIIMTRDENVPPIVEFGPEYFDGLIIKSGESLRIKALVQGRPVPRVTWFKDGVEIEKRMNMEITDVLGSTSLFVRDATRDHRGVYTVEAKNASGSAKAEIKVKVQDTPGKVVGPIRFTNITGEKMTLWWDAPLNDGCAPITHYIIEKRETSRLAWALIEDKCEAQSYTAIKLINGNEYQFRVSAVNKFGVGRPLDSDPVVAQIQYTVPDAPGIPEPSNITGNSITLTWARPESDGGSEIQQYILERREKKSTRWVKVISKRPISETRFKVTGLTEGNEYEFHVMAENAAGVGPASGISRLIKCREPVNPPGPPTVVKVTDTSKTTVSLEWSKPVFDGGMEIIGYIIEMCKADLGDWHKVNAEACVKTRYTVTDLQAGEEYKFRVSAINGAGKGDSCEVTGTIKAVDRLTAPELDIDANFKQTHVVRAGASIRLFIAYQGRPTPTAVWSKPDSNLSLRADIHTTDSFSTLTVENCNRNDAGKYTLTVENNSGSKSITFTVKVLDTPGPPGPITFKDVTRGSATLMWDAPLLDGGARIHHYVVEKREASRRSWQVISEKCTRQIFKVNDLAEGVPYYFRVSAVNEYGVGEPYEMPEPIVATEQPAPPRRLDVVDTSKSSAVLAWLKPDHDGGSRITGYLLEMRQKGSDFWVEAGHTKQLTFTVERLVEKTEYEFRVKAKNDAGYSEPREAFSSVIIKEPQIEPTADLTGITNQLITCKAGSPFTIDVPISGRPAPKVTWKLEEMRLKETDRVSITTTKDRTTLTVKDSMRGDSGRYFLTLENTAGVKTFSVTVVVIGRPGPVTGPIEVSSVSAESCVLSWGEPKDGGGTEITNYIVEKRESGTTAWQLVNSSVKRTQIKVTHLTKYMEYSFRVSSENRFGVSKPLESAPIIAEHPFVPPSAPTRPEVYHVSANAMSIRWEEPYHDGGSKIIGYWVEKKERNTILWVKENKVPCLECNYKVTGLVEGLEYQFRTYALNAAGVSKASEASRPIMAQNPVDAPGRPEVTDVTRSTVSLIWSAPAYDGGSKVVGYIIERKPVSEVGDGRWLKCNYTIVSDNFFTVTALSEGDTYEFRVLAKNAAGVISKGSESTGPVTCRDEYAPPKAELDARLHGDLVTIRAGSDLVLDAAVGGKPEPKIIWTKGDKELDLCEKVSLQYTGKRATAVIKFCDRSDSGKYTLTVKNASGTKAVSVMVKVLDSPGPCGKLTVSRVTQEKCTLAWSLPQEDGGAEITHYIVERRETSRLNWVIVEGECPTLSYVVTRLIKNNEYIFRVRAVNKYGPGVPVESEPIVARNSFTIPSPPGIPEEVGTGKEHIIIQWTKPESDGGNEISNYLVDKREKKSLRWTRVNKDYVVYDTRLKVTSLMEGCDYQFRVTAVNAAGNSEPSEASNFISCREPSYTPGPPSAPRVVDTTKHSISLAWTKPMYDGGTDIVGYVLEMQEKDTDQWYRVHTNATIRNTEFTVPDLKMGQKYSFRVAAVNVKGMSEYSESIAEIEPVERIEIPDLELADDLKKTVTIRAGASLRLMVSVSGRPPPVITWSKQGIDLASRAIIDTTESYSLLIVDKVNRYDAGKYTIEAENQSGKKSATVLVKVYDTPGPCPSVKVKEVSRDSVTITWEIPTIDGGAPVNNYIVEKREAAMRAFKTVTTKCSKTLYRISGLVEGTMYYFRVLPENIYGIGEPCETSDAVLVSEVPLVPAKLEVVDVTKSTVTLAWEKPLYDGGSRLTGYVLEACKAGTERWMKVVTLKPTVLEHTVTSLNEGEQYLFRIRAQNEKGVSEPRETVTAVTVQDLRVLPTIDLSTMPQKTIHVPAGRPVELVIPIAGRPPPAASWFFAGSKLRESERVTVETHTKVAKLTIRETTIRDTGEYTLELKNVTGTTSETIKVIILDKPGPPTGPIKIDEIDATSITISWEPPELDGGAPLSGYVVEQRDAHRPGWLPVSESVTRSTFKFTRLTEGNEYVFRVAATNRFGIGSYLQSEVIECRSSIRIPGPPETLQIFDVSRDGMTLTWYPPEDDGGSQVTGYIVERKEVRADRWVRVNKVPVTMTRYRSTGLTEGLEYEHRVTAINARGSGKPSRPSKPIVAMDPIAPPGKPQNPRVTDTTRTSVSLAWSVPEDEGGSKVTGYLIEMQKVDQHEWTKCNTTPTKIREYTLTHLPQGAEYRFRVLACNAGGPGEPAEVPGTVKVTEMLEYPDYELDERYQEGIFVRQGGVIRLTIPIKGKPFPICKWTKEGQDISKRAMIATSETHTELVIKEADRGDSGTYDLVLENKCGKKAVYIKVRVIGSPNSPEGPLEYDDIQVRSVRVSWRPPADDGGADILGYILERREVPKAAWYTIDSRVRGTSLVVKGLKENVEYHFRVSAENQFGISKPLKSEEPVTPKTPLNPPEPPSNPPEVLDVTKSSVSLSWSRPKDDGGSRVTGYYIERKETSTDKWVRHNKTQITTTMYTVTGLVPDAEYQFRIIAQNDVGLSETSPASEPVVCKDPFDKPSQPGELEILSISKDSVTLQWEKPECDGGKEILGYWVEYRQSGDSAWKKSNKERIKDKQFTIGGLLEATEYEFRVFAENETGLSRPRRTAMSIKTKLTSGEAPGIRKEMKDVTTKLGEAAQLSCQIVGRPLPDIKWYRFGKELIQSRKYKMSSDGRTHTLTVMTEEQEDEGVYTCIATNEVGEVETSSKLLLQATPQFHPGYPLKEKYYGAVGSTLRLHVMYIGRPVPAMTWFHGQKLLQNSENITIENTEHYTHLVMKNVQRKTHAGKYKVQLSNVFGTVDAILDVEIQDKPDKPTGPIVIEALLKNSAVISWKPPADDGGSWITNYVVEKCEAKEGAEWQLVSSAISVTTCRIVNLTENAGYYFRVSAQNTFGISDPLEVSSVVIIKSPFEKPGAPGKPTITAVTKDSCVVAWKPPASDGGAKIRNYYLEKREKKQNKWISVTTEEIRETVFSVKNLIEGLEYEFRVKCENLGGESEWSEISEPITPKSDVPIQAPHFKEELRNLNVRYQSNATLVCKVTGHPKPIVKWYRQGKEIIADGLKYRIQEFKGGYHQLIIASVTDDDATVYQVRATNQGGSVSGTASLEVEVPAKIHLPKTLEGMGAVHALRGEVVSIKIPFSGKPDPVITWQKGQDLIDNNGHYQVIVTRSFTSLVFPNGVERKDAGFYVVCAKNRFGIDQKTVELDVADVPDPPRGVKVSDVSRDSVNLTWTEPASDGGSKITNYIVEKCATTAERWLRVGQARETRYTVINLFGKTSYQFRVIAENKFGLSKPSEPSEPTITKEDKTRAMNYDEEVDETREVSMTKASHSSTKELYEKYMIAEDLGRGEFGIVHRCVETSSKKTYMAKFVKVKGTDQVLVKKEISILNIARHRNILHLHESFESMEELVMIFEFISGLDIFERINTSAFELNEREIVSYVHQVCEALQFLHSHNIGHFDIRPENIIYQTRRSSTIKIIEFGQARQLKPGDNFRLLFTAPEYYAPEVHQHDVVSTATDMWSLGTLVYVLLSGINPFLAETNQQIIENIMNAEYTFDEEAFKEISIEAMDFVDRLLVKERKSRMTASEALQHPWLKQKIERVSTKVIRTLKHRRYYHTLIKKDLNMVVSAARISCGGAIRSQKGVSVAKVKVASIEIGPVSGQIMHAVGEEGGHVKYVCKIENYDQSTQVTWYFGVRQLENSEKYEITYEDGVAILYVKDITKLDDGTYRCKVVNDYGEDSSYAELFVKGVREVYDYYCRRTMKKIKRRTDTMRLLERPPEFTLPLYNKTAYVGENVRFGVTITVHPEPHVTWYKSGQKIKPGDNDKKYTFESDKGLYQLTINSVTTDDDAEYTVVARNKYGEDSCKAKLTVTLHPPPTDSTLRPMFKRLLANAECQEGQSVCFEIRVSGIPPPTLKWEKDG

SEQ ID NO: 3450 - skipped

SEQ ID NO: 3451 - protein, 563 aa, Homo sapiens
MANSSFIGDHVHGAPHAVMPEVEFPDQFFTVLTMDHELVTLRDVVINFSQEEWEYLDSAQRNLYWDVMMENYSNLLSLDLESRNETKHLSVGKDIIQNTGSQWEVMESSKLCGLEGSIFRNDWQSKSKIDLQGPEVGYFSQMKIISENVPSYKTHESLTLPRRTHDSEKPYEYKEYEKVFSCDLEFDEYQKIHTGGKNYECNQCWKTFGIDNSSMLQLNIHTGVKPCKYMEYGNTCSFYKDFNVYQKIHNEKFYKCKEYRRTFERVGKVTPLQRVHDGEKHFECSFCGKSFRVHAQLTRHQKIHTDEKTYKCMECGKDFRFHSQLTEHQRIHTGEKPYKCMHCEKVFRISSQLIEHQRIHTGEKPYACKECGKAFGVCRELARHQRIHTGKKPYECKACGKVFRNSSSLTRHQRIHTGEKPYKCKECEKAFGVGSELTRHERIHSGQKPYECKECGKFFRLTSALIQHQRIHSGEKPYECKVCGKAFRHSSALTEHQRIHTGEKPYECKACGKAFRHSSSFTKHQRIHTDDKPYECKECGNSFSVVGHLTCQPKIYTGEKSFD

SEQ ID NO: 3452 - protein, 97 aa, Homo sapiens
MEPKVINQMLSKAAQSGQWKYGQHACFCQKQGSGNNWAYGYSVHGPRHEESIMNIIRKEVEKCDSFSGFFIIMSMAGGTGSGLGAFVTQNLEDQYSN

SEQ ID NO: 3453 - protein, 167 aa, Homo sapiens
QVIHQLGPGLRSKMAIQTQQSKFVNWQVDGEYRGSDFTAAVTLGNPDVLVGSGILVAHYLQSITPCLALGGELVYHRRPGEEGTVMSLAGKYTLNNWLATVTLGQAGMHATYYHKASDQLQVGVEFEASTRMQDTSVSFGYQLDLPKANLLFKGKGLGSPTRETGRR

SEQ ID NO: 3454 - protein, 1754 aa, Homo sapiens
MNSLFRKRNKGKYSPTVQTRSISNKELSELIEQLQKNADQVEKNIVDTEAKMQSDLARLQEGRQPEHRDVTLQKVLDSEKLLYVLEADAAIAKHMKHPQGDMIAEDIRQLKERVTNLRGKHKQIYRLAVKEVDPQVNWAALVEEKLDKLNNQSFGTDLPLVDHQVEEHNIFHNEVKAIGPHLAKDGDKNSELRAKYQKLLAASQARQQHLSSLQDYMQRCTNELYWLDQQAKGRMQYDWSDRNLDYPSRRRQYENFINRNLEAKEERINKLHSEGDQLLAAEHPGRNSIEAHMEAVHADWKEYLNLLICEESHLKYMEDYHQFHEDVKDAQELLRKVDSDLNQKYGPDFKDRYQIELLLRELDDQEKVLDKYEDVVQGLQKRGQQVVPLKYRRETPLKPIPVEALCDFEGEQGLISRGYSYTLQKNNGESWELMDSAGNKLIAPAVCFVIPPTDPEALALADSLGSQYRSVRQKAAGSKRTLQQRYEVLKTENPGDASDLQGRQLLAGLDKVASDLDRQEKAITGILRPPLEQGRAVQDSAERAKDLKNITNELLRIEPEKTRSTAEGEAFIQALPGSGTTPLLRTRVEDTNRKYEHLLQLLDLAQEKVDVANRLEKSLQQSWELLATHENHLNQDDTVPESSRVLDSKGQELAAMACELQAQKSLLGEVEQNLQAAKQCSSTLASRFQEHCPDLERQEAEVHKLGQRFNNLRQQVERRAQSLQSAKAAYEHFHRGHDHVLQFLVSIPSYEPQETDSLSQMETKLKNQKNLLDEIASREQEVQKICANSQQYQQAVKDYELEAEKLRSLLDLENGRRSHVSKRARLQSPATKVKEEEAALAAKFTEVYAINRQRLQNLEFALNLLRQQPEVEVTHETLQRNRPDSGVEEAWKIRKELDEETERRRQLENEVKSTQEEIWTLRNQGPQESVVRKEVLKKVPDPVLEESFQQLQRTLAEEQHKNQLLQEELEALQLQLRALEQETRDGGQEYVVKEVLRIEPDRAQADEVLQLREELEALRRQKGAREAEVLLLQQRVAALAEEKSRAQEKVTEKEVVKLQNDPQLEAEYQQLQEDHQRQDQLREKQEEELSFLQDKLKRLEKERAMAEGKITVKEVLKVEKDAATEREVSDLTRQYEDEAAKARASQREKTELLRKIWALEEENAKVVVQEKVREIVRPDPKAESEVANLRLELVEQERKYRGAEEQLRSYQSELEALRRRGPQVEVKEVTKEVIKYKTDPEMEKELQRLREEIVDKTRLIERCDLEIYQLKKEIQALKDTKPQVQTKEVVQEILQFQEDPQTKEEVASLRAKLSEEQKKQVDLERERASQEEQIARKEEELSRVKERVVQQEVVRYEEEPGLRAEASAFAESIDVELRQIDKLRAELRRLQRRRTELERQLEELERERQARREAEREVQRLQQRLAALEQEEAEAREKVTHTQKVVLQQDPQQAREHALLRLQLEEEQHRRQLLEGELETLRRKLAALEKAEVKEKVVLSESVQVEKGDTEQEIQRLKSSLEEESRSKRELDVEVSRLEARLSELEFHNSKSSKELDFLREENHKLQLERQNLQLETRRLQSEINMAATETRDLRNMTVADSGTNHDSRLWSLERELDDLKRLSKDKDLEIDELQKRLGSVAVKREQRENHLRRSIVVIHPDTGRELSPEEAHRAGLIDWNMFVKLRSQECDWEEISVKGPNGESSVIHDRKSGKKFSIEEALQSGRLTPAQYDRYVNKDMSIQELAVLVSGQK

SEQ ID NO: 3455 - protein, 851 aa, Homo sapiens
MAQVLHVPAPFPGTPGPASPPAFPAKDPDPPYSVETPYGYRLDLDFLKYVDDIEKGHTLRRVAVQRRPRLSSLPRGPGSWWTSTESLCSNASGDSRHSAYSYCGRGFYPQYGALETRGGFNPRVERTLLDARRRLEDQAATPTGLGSLTPSAAGSTASLVGVGLPPPTPRSSGLSTPVPPSAGHLAHVREQMAGALRKLRQLEEQVKLIPVLQVKLSVLQEEKRQLTVQLKSQKFLGHPTAGRGRSELCLDLPDPPEDPVALETRSVGTWVRERDLGMPDGEAALAAKVAVLETQLKKALQELQAAQARQADPQPQAWPPPDSPVRVDTVRVVEGPREVEVVASTAAGAPAQRAQSLEPYGTGLRALAMPGRPESPPVFRSQEVVETMCPVPAAATSNVHMVKKISITERSCDGAAGLPEVPAESSSSPPGSEVASLTQPEKSTGRVPTQEPTHREPTRQAASQESEEAGGTGGPPAGVRSIMKRKEEVADPTAHRRSLQFVGVNGGYESSSEDSSTAENISDNDSTENEAPEPRERVPSVAEAPQLRPAGTAAAKTSRQECQLSRESQHIPTAEGASGSNTEEEIRMELSPDLISACLALEKYLDNPNALTERELKVAYTTVLQEWLRLACRSDAHPELVRRHLVTFRAMSARLLDYVVNIADSNGNTALHYSVSHANFPVVQQLLDSGVCKVDKQNRAGYSPIMLTALATLKTQDDIETVLQLFRLGNINAKASQAGQTALMLAVSHGRVDVVKALLACEADVNVQDDDGSTALMCACEHGHKEIAGLLLAVPSCDISLTDRDGSTALMVALDAGQSEIASMLYSRMNIKCSFAPMSDDESPTSSSAEE

SEQ ID NO: 3456 - protein, 152 aa, Homo sapiens
GSFPPQSCIFSQVLNMGAALAAWICIVRYHQLRDWGVRRWPNQLILWTGLLCALGTSVVGNFQEKNQRPTHLAGAFLAFILGNVYFWLQLLLWRLKRLPQPGAAWIGPLRLGLCSVCTILIVAMIVLHACSLRSVSAACEWVVAMLLFALFG

SEQ ID NO: 3457 - protein, 644 aa, Homo sapiens
MEAVCGAWGRGLVLGVSVLGSKEPGDPHANAPRALTVLSTSIQAPGSAQVAGLCGRLTLHRDLRTGRWEPDPQRSRRCLRDPQRVLEYCRQMYPELQIARVEQATQAIPMERWCGGSRSGSCAHPHHQVVPFRCLPGEFVSEALLVPEGCRFLHQERMDQCESSTRRHQEAQEACSSQGLILHGSGMLLPCGSDRFRGVEYVCCPPPGTPDPSGTAVGDPSTRSWPPGSRVEGAEDEEEEESFPQPVDDYFVEPPQAEEEEETVPPPSSHTLAVVGKVTPTPRPTDGVDIYFGMPGEISEHEGFLRAKMDLEERRMRQINEVMREWAMADNQSKNLPKADRQALNEHFQSILQTLEEQVSGERQRLVETHATRVIALINDQRRAALEGFLAALQADPPQAERVLLALRRYLRAEQKEQRHTLRHYQHVAAVDPEKAQQMRFQVHTHLQVIEERVNQSLGLLDQNPHLAQELRPQIQELLHSEHLGPSELEAPAPGGSSEDKGGLQPPDSKDDTPMTLPKGSTEQDAASPEKEKMNPLEQYERKVNASVPRGFPFHSSEIQRDELAPAGTGVSREAVSGLLIMGAGGGSLIVLSMLLLRRKKPYGAISHGVVEVDPMLTLEEQQLRELQRHGYENPTYRFLEERP

SEQ ID NO: 3458 - protein, 120 aa, Homo sapiens
MSAGALGALQLPGVLTRLRADLLSYLRHVQWLRRAGGSSLKTLEPELGTLQARLDRLLRRLQLLMSRLALPQPPPDPPAPPLAPPSSAWGGIRAAHAILGGLHLTLDWAVRGLLLLKTRL

SEQ ID NO: 3459 - protein, 673 aa, Homo sapiens
MNRKDSKRKSHQECTGKIGGRGRPRQVRRHKTCPSPREISKVMASMNLGLLSEGGCSEDELLEKCIQSFDSAGSLCHEDHMLNMVLAMHSWVLPSADLAARLLTSYQKATGDTQELRRLQICHLVRYWLMRHPEVMHQDPQLEEVIGRFWATVAREGNSAQRRLGDSSDLLSPGGPGPPLPMSSPGLGKKRKVSLLFDHLETGELAQHLTYLEFRSFQAITPQDLRSYVLQGSVRGCPALEGSVGLSNSVSRWVQVMVLSRPGPLQRAQVLDKFIHVAQRLHQLQNFNTLMAVTGGLCHSAISRLKDSHAHLSPDSTKALLELTELLASHNNYARYRRTWAGCAGFRLPVLGVHLKDLVSLHEAQPDRLPDGRLHLPKLNNLYLRLQELVALQGQHPPCSANEDLLHLLTLSLDLFYTEDEIYELSYAREPRCPKSLPPSPFNAPLVVEWAPGVTPKPDRVTLGRHVEQLVESVFKNYDPEGRGTISQEDFERLSGNFPFACHGLHPPPRQGRGSFSREELTGYLLRASAICSKLGLAFLHTFHEVTFRKPTFCDSCSGFLWGVTKQGYRCRECGLCCHKHCRDQVKVECKKRPGAKGDAGPPGAPVPSTPAPHASCGSEENHSYTLSLEPETGCQLRHAWTQTESPHPSWETDTVPCPVMDPPSTASSKLDS

SEQ ID NO: 3460 - protein, 84 aa, Homo sapiens
MWGYLSLMPVFLAVWAISGVWIVFAIAVTNRTVDLSKGFPYISICGSFPPQSCIFSQVLNMGAALGKEPAAYALGRGLPCLHLG

SEQ ID NO: 3461 - protein, 668 aa, Homo sapiens
MTKRKKLRTSGEGLCPPKPLKNPRLGDFYGDPQSSMLGCLHHPEEPEGKLGPVPSTQQHGEEPGKAVSSSPDEETGSPCRLLRQPEKEPAPLPPSQNSFGRFVPQFAKSRKTVTRKEEMKDEDRGSGAFSLETIAESSAQSPGCQLLVETLGVPLQEATELGDPTQADSARPEQSSQSPVQAVPGSGDSQPDDPPDRGTGLSASQRASQDHLSEQGADDSKPETDRVPGDGGQKEHLPSIDSEGEKPDRGAPQEGGAQRTAGAGLPGGPQEEGDGVPCTPASAPTSGPAPGLGPASWCLEPGSVAQGSPDPQQTPSRMGREGEGTHSSLGCSSLGMVVIADLSTDPTELEERALEVAGPDGQASAISPASPRRKAADGGHRRALPGCTSLTGETTGESGEAGQDGKPPGDVLVGPTASLALAPGSGESMMGAGDSGHASPDTGPCVNQKQEPGPAQEEAELGGQNLERDLEGFRVSPQASVVLEHREIADDPLQEPGAQQGIPDTTSELAGQRDHLPHSADQGTWADSLAVELDFLLDSQIQDALDASDFEAPPEQLFPSGNKPGPCWPGPSSHANGDPVAVAKAQPRTFVGIQASEASRMEDATNVVRGLIVELSNLNRLIMGTHRDLEAFKRLNYRKTKLGGKAPLPYPSKGPGNIPRGDPPWREL

SEQ ID NO: 3462 - protein, 374 aa, Homo sapiens
AINIGLTVLPPPRTIKIAILNFDEYALNKEGIEKILTMIPTDEEKQKIQEAQLANPEIPLGSAEQFLLTLSSISELSARLHLWAFKMDYETTEKEVAEPLLDLKEGIDQLENNKTLGFILSTLLAIGNFLNGTNAKAFELSYLEKVPEVKDTVHKQSLLHHVCTMVVENFPDSSDLYSEIGAITRSAKVDFDQLQDNLCQMERRCKASWDHLKAIAKHEMKPVLKQRMSEFLKDCAERIIILKIVHRRIINRFHSFLLFMGHPPYAIREVNINKFCRIISEFALEYRTTRERVLQQKQKRANHRERNKTRGKMITDDPLVPGLWELMTRPMSQMMQLMRSWTASSSQPPKCPVSEWCRGRGNDPGPTGNLCEEP

SEQ ID NO: 3463 - protein, 150 aa, Homo sapiens
MRLLVLLWGCLLLPGYEALEGPEEISGFEGDTVSLQCTYREELRDHRKYWCRKGGILFSRCSGTIYAEEEGQETMKGRVSIRDSRQELSLIVTLWNLTLQDAGEYWCGVEKRGPDESLLISLFVFPGNRYLSFPRLGTGAAEGRGRGGGA

SEQ ID NO: 3464 - protein, 73 aa, Homo sapiens
MVQKKPAELQGFHRSFKGQNPFELAFSLDQPDHGDSDFGLQCSARPGEGPEGEEGTGQLLSLPWQWPAPAGGW

SEQ ID NO: 3465 - protein, 40 aa, Homo sapiens
MGWAAFNLSNVTGNSRILCSVYCNGSQITGSSNITVYRLP

SEQ ID NO: 3466 - protein, 329 aa, Homo sapiens
MGNVLAASSPPAGPPPPPAPALVGLPPPPPSPPGFTLPPLGGSLGAGTSTSRSSERTPGAATASASGAAEDGACGCLPNPGTFEECHRKCKELFPIQMEGVKLTVNKGLSNHFQVNHTVALSTIGESNYHFGVTYVGTKQLSPTEAFPVLVGDMDNSGSLNAQVIHQLGPGLRSKMAIQTQQSKFVNWQVDGEYRGSDFTAAVTLGNPDVLVGSGILVAHYLQSITPCLALGGELVYHRRPGEEGTVMSLAGKYTLNNWLATVTLGQAGMHATYYHKASDQLQVGVEFEASTRMQDTSVSFGYQLDLPKANLLFKGKGLGSPTRETGRR

SEQ ID NO: 3467 - protein, 173 aa, Homo sapiens
MYPELQIARVEQATQAIPMERWCGGSRSGSCAHPHHQVVPFRCLPGEFVSEALLVPEGCRFLHQERMDQCESSTRRHQEAQEACSSQGLILHGSGMLLPCGSDRFRGVEYVCCPPPGTPDPSGTAVGDPSTRSWPPGSRVEGAEDEEEEESFPQPVDDYFVEPPQAEEEEETV

SEQ ID NO: 3468 - protein, 76 aa, Homo sapiens
MVQKKPAELQGFHRSFKGQNPFELAFSLDQPDHGDSDFGLQCSARPGEGPEGEEGTGQLLSLPWQWPAPAGGWGHA

SEQ ID NO: 3469 - protein, 716 aa, Homo sapiens
MPSTSFPVPSKFPLGPAAAVFGRGETLGPAPRAGGTMKSAEEEHYGYASSNVSPALPLPTAHSTLPAPCHNLQTSTPGIIPPADHPSGYGAALDGGPAGYFLSSGHTRPDGAPALESPRIEITSCLGLYHNNNQFFHDVEVEDVLPSSKRSPSTATLSLPSLEAYRDPSCLSPASSLSSRSCNSEASSYESNYSYPYASPQTSPWQSPCVSPKTTDPEEGFPRGLGACTLLGSPRHSPSTSPRASVTEESWLGARSSRPASPCNKRKYSLNGRQPPYSPHHSPTPSPHGSPRVSVTDDSWLGNTTQYTSSAIVAAINALTTDSSLDLGDGVPVKSRKTTLEQPPSVALKVEPVGEDLGSPPPPADFAPEDYSSFQHIRKGGFCDQYLAVPQHPYQWAKPKPLSPTSYMSPTLPALDWQLPSHSGPYELRIEVQPKSHHRAHYETEGSRGAVKASAGGHPIVQLHGYLENEPLMLQLFIGTADDRLLRPHAFYQVHRITGKTVSTTSHEAILSNTKVLEIPLLPENSMRAVIDCAGILKLRNSDIELRKGETDIGRKNTRVRLVFRVHVPQPSGRTLSLQVASNPIECSQRSAQELPLVEKQSTDSYPVVGGKKMVLSGHNFLQDSKVIFVEKAPDGHHVWEMEAKTDRDLCKPNSLVVEIPPFRNQRITSPVHVSFYVCNGKRKRSQYQRFTYLPANGNAIFLTVSREHERVGCFF

SEQ ID NO: 3470 - protein, 192 aa, Homo sapiens
ELSVLDSLNARMARPQGSSVHDGVPVPFQLPPGVSNEAQYVFTIQSIVMAQKLKGTLSFIAKNDEGATHEKLDFRLHFSCSSYLITTPCYSDAFAKLLESGDLSMSSIKVDGIRMSFQNLLAKICFHHHFSGLLKLWPRAAQEGGPCSGGGAAAMQCPGSLTLPALLQLWSEWTPAPPCTAAPSRATMSASW

SEQ ID NO: 3471 - protein, 134 aa, Homo sapiens
MWGYLSLMPVFLAVWAISGVWIVFAIAVTNRTVDLSKGFPYISICGSFPPQSCIFSQVLNMGAALAAWICIVRYHQLRDWGVRRWPNQLILWTGLLCALGTSVVGNFQEKNQRPTHLAGAFLAFILGNVYFWLQ

SEQ ID NO: 3472 - protein, 134 aa, Homo sapiens
LGEGHFGKVSLYCYDPTNDGTGEMVAVKALKADCGPQHRSGWKQEIDILRTLYHEHIIKYKGCCEDQGHGLSARAALHPPRPSRAQRAAGQRQAGQDRGLWPSQGRARRPRVLPRARGWGQPRVLVCPRVPEGV

SEQ ID NO: 3473 - protein, 88 aa, Homo sapiens
MVKKFKDSKSVLLITCKTCNRTVKHHGKSRSFVSTLKSNPATPTSKLSLKTPERRTANPNHDMSGSKGKSPASVFRTPTSGQSVSTCS

SEQ ID NO: 3474 - protein, 260 aa, Homo sapiens
EGKPYNQKSDIWALGCVLYELASLKRAFEAANLPALVLKIMSGTFAPISDRYSPELRQLVLSLLSLEPAQRPPLSHIMAQPLCIRALLNLHTDVGSVRMRRPVQGQRAVLGGRVWAPSGSTGGPHLSCRAEKSVAPSNTGSRTTSVRCRGIPRGPVRPAIPPPLSSVYAWGGGLGTPLRLPMLNTEVVQVAAGRTQKAGVTRSGRLILWEAPPLGAGGGSLLPGAVEQPQPQFISRFLEGQSGVTIKHVACGDFFTACLT

SEQ ID NO: 3475 - protein, 700 aa, Homo sapiens
MTGLEDQEFDFEFLFEFNQRDEGAAAAAPEHYGYASSNVSPALPLPTAHSTLPAPCHNLQTSTPGIIPPADHPSGYGAALDGGPAGYFLSSGHTRPDGAPALESPRIEITSCLGLYHNNNQFFHDVEVEDVLPSSKRSPSTATLSLPSLEAYRDPSCLSPASSLSSRSCNSEASSYESNYSYPYASPQTSPWQSPCVSPKTTDPEEGFPRGLGACTLLGSPRHSPSTSPRASVTEESWLGARSSRPASPCNKRKYSLNGRQPPYSPHHSPTPSPHGSPRVSVTDDSWLGNTTQYTSSAIVAAINALTTDSSLDLGDGVPVKSRKTTLEQPPSVALKVEPVGEDLGSPPPPADFAPEDYSSFQHIRKGGFCDQYLAVPQHPYQWAKPKPLSPTSYMSPTLPALDWQLPSHSGPYELRIEVQPKSHHRAHYETEGSRGAVKASAGGHPIVQLHGYLENEPLMLQLFIGTADDRLLRPHAFYQVHRITGKTVSTTSHEAILSNTKVLEIPLLPENSMRAVIDCAGILKLRNSDIELRKGETDIGRKNTRVRLVFRVHVPQPSGRTLSLQVASNPIECSQRSAQELPLVEKQSTDSYPVVGGKKMVLSGHNFLQDSKVIFVEKAPDGHHVWEMEAKTDRDLCKPNSLVVEIPPFRNQRITSPVHVSFYVCNGKRKRSQYQRFTYLPANVNEIIRNDLSSTSTHS

SEQ ID NO: 3476 - protein, 212 aa, Homo sapiens
LSLLNGSESAKLFAPPRDTPPKCIRCAVVGNGGILNGSRQGPNIDAHDYVFRLNGAVIKGFERDVGTKTSFYGFTVNTMKNSLVSYWNLGFTSVPQGQDLQYIFIPSDIRDYVMLRSAILGVPVPEGLDKGDRFLKSKLINTHFGDLYMPSTGALMLLTALHTCDQVSAYGFITSNYWKFSDHYFERKMKPLIFYANHDLSLEAALWRDLHK

SEQ ID NO: 3477 - protein, 646 aa, Homo sapiens
MACSLQKLFAVEEEFEDEDFLSAVEDAENRFTGSLPVNAGRLRPVSSRPQETVQAQSSRLLLLHPTAPSEALGLPDLDLCLPASSTPSADSRPSCIGAAPLRPVSTSSSWIGNQRRVTVTEVLRETARPQSSALHPLLTFESQQQQVGGFEGPEQDEFDKVLASMELEEPGMELECGVSSEAIPILPAQQREGSVLAKKARVVDLSGSCQKGPVPAIHKAGIMSAQDESLDPVIQCRTPRPPLRPGAVGHLPVPTALTVPTQQLHWEVCPQRSPVQALQPLQAARGTIQSSPQNRFPCQPFQSPSSWLSGKAHLPRPRTPNSSCSTPSRTSSGLFPRIPLQPQAPVSSIGSPVGTPKGPQGALQTPIVTNHLVQLVTAASRTPQQPTHPSTRAKTRRFPGPAGILPHQQSGRSLEDIMVSAPQTPTHGALAKFQTEIVASSQASVEEDFGRGPWLTMKSTLGLDERDPSCFLCTYSIVMVLRKAALKQLPRNKVPNMAVMIKSLTRSTMDASVVFKDPTGEMQGTVHRLLLETCQNELKPGSVLLLKQIGVFSPSLRNHYLNVTPNNLVHIYSPDSGDGSFLKPSQPFPKDSGSFQHDVAAKPEEGFRTAQNLEAEASPEEELPEADDLDGLLSELPEDFFCGTSS

SEQ ID NO: 3478 - protein, 123 aa, Homo sapiens
MGRPTQWPSLLLLLLLPGPPPVAGLEDAAFPHLGESLQPLPRACPLRCSCPRVDTVDCDGLDLRVFPDNITRAAQHLSLQNNQLQELPYNELSRLSGLRTLNLHNNLISSEEQSHLQGAPRSP

SEQ ID NO: 3479 - protein, 711 aa, Homo sapiens
MGDERPHYYGKHGTPQKYDPTFKGPIYNRGCTDIICCVFLLLAIVGYVAVGIIAWTHGDPRKVIYPTDSRGEFCGQKGTKNENKPYLFYFNIVKCASPLVLLEFQCPTPQICVEKCPDRYLTYLNARSSRDFEYYKQFCVPGFKNNKGVAEVLQDGDCPAVLIPSKPLARRCFPAIHAYKGVLMVGNETTYEDGHGSRKNITDLVEGAKKANGVLEARQLAMRIFEDYTVSWYWIIIGLVIAMAMSLLFIILLRFLAGIMVWVMIIMVILVLGYGIFHCYMEYSRLRGEAGSDVSLVDLGFQTDFRVYLHLRQTWLAFMIILSILEVIIILLLIFLRKRILIAIALIKEASRAVGYVMCSLLYPLVTFFLLCLCIAYWASTAVFLSTSNEAVYKIFDDSPCPFTAKTCNPETFPSSNESRQCPNARCQFAFYGGESGYHRALLGLQIFNAFMFFWLANFVLALGQVTLAGAFASYYWALRKPDDLPAFPLFSAFGRALRYHTGSLAFGALILAIVQIIRVILEYLDQRLKAAENKFAKCLMTCLKCCFWCLEKFIKFLNRNAYIMIAIYGTNFCTSARNAFFLLMRNIIRVAVLDKVTDFLFLLGKLLIVGSVGILAFFFFTHRIRIVQDTAPPLNYYWVPILTVIVGSYLIAHGFFSVYGMCVDTLFLCFCEDLERNDGSQERPYFMSPELRDILLKGSAEEGKRAEAEE

SEQ ID NO: 3480 - protein, 41 aa, Homo sapiens
MEPKVINQMLSKAAQSGQWKYGQHACFCQKQGSGNNWAYGY

SEQ ID NO: 3481 - protein, 99 aa, Homo sapiens
MLDGRWTVTTLSGDMGPRAGFGHLARCHDLLICTAELLQMALTSPEEEEHVELTVFSLIVVDECHHTHKDTVYNVIMSQYLELKLQRAQPLPQVLGLTA

SEQ ID NO: 3482 - protein, 243 aa, Homo sapiens
MTKRKKLRTSGEGLCPPKPLKNPRLGDFYGDPQSSMLGCLHHPEEPEGKLGPVPSTQQHGEEPGKAVSSSPDEETGSPCRLLRQPEKEPAPLPPSQNSFGRFVPQFAKSRKTVTRKEEMKDEDRGSGAFSLLFPSGNKPGPCWPGPSSHANGDPVAVAKAQPRTFVGIQASEASRMEDATNVVRGLIVELSNLNRLIMGTHRDLEAFKRLNYRKTKLGGKAPLPYPSKGPGNIPRGDPPWREL

SEQ ID NO: 3483 - protein, 145 aa, Homo sapiens
SDPFVQLTLEPRHEFPELAARETQKHKKDLHPLFDETFEFLVPAEPCRKAGACLLLTVLDYDTLGADDLEGEAFLPLREVPGLSGSEEPGEVPQTRLPLTYPAPNGDPILQLLEGRKGDREAQVFVRLRRHRAKQASQHALRPAP

SEQ ID NO: 3484 - protein, 151 aa, Homo sapiens
WVRLLRRLIPNATGTGTFSPGASPGSEARTTGDISVEKLNLGTDSDSSPQKSSRDPPSSPSSLSSPIQESTAPELPSETQETPGPALCSPVGPAPATALCAHAVRPHRRQQLRRGVHRGGPHTEPAPRRAAPHSRGAGSLPGLRLRGRGLL

SEQ ID NO: 3485 - protein, 121 aa, Homo sapiens
MMMGSARVAELLLLHGAEPNCADPATLTRPVHDAAREGFLDTLVVLHRAGARLDVRDAWGRLPVDLAEELGHRDVARYLRAAAGGTRGSNHARIDAAEGPSVTASIQVPGGEEGDFGSSYS

SEQ ID NO: 3486 - protein, 659 aa, Homo sapiens
MNRKDSKRKSHQECTGKIGGRGRPRQVRRHKTCPSPREISKVMASMNLGLLSEGGCSEDELLEKCIQSFDSAGSLCHEDHMLNMVLAMHSWVLPSADLAARLLTSYQKATGDTQELRRLQICHLVRYWLMRHPEVMHQDPQLEEVIGRFWATVAREGNSAQRRLGDSSDLPGLGKKRKVSLLFDHLETGELAQHLTYLEFRSFQAITPQDLRSYVLQGSVRGCPALEGSVGLSNSVSRWVQVMVLSRPGPLQRAQVLDKFIHVAQRLHQLQNFNTLMAVTGGLCHSAISRLKDSHAHLSPDSTKALLELTELLASHNNYARYRRTWAGCAGFRLPVLGVHLKDLVSLHEAQPDRLPDGRLHLPKLNNLYLRLQELVALQGQHPPCSANEDLLHLLTLSLDLFYTEDEIYELSYAREPRCPKSLPPSPFNAPLVVEWAPGVTPKPDRVTLGRHVEQLVESVFKNYDPEGRGTISQEDFERLSGNFPFACHGLHPPPRQGRGSFSREELTGYLLRASAICSKLGLAFLHTFHEVTFRKPTFCDSCSGFLWGVTKQGYRCRECGLCCHKHCRDQVKVECKKRPGAKGDAGPPGAPVPSTPAPHASCGSEENHSYTLSLEPETGCQLRHAWTQTESPHPSWETDTVPCPVMDPPSTASSKLDS

SEQ ID NO: 3487 - protein, 191 aa, Homo sapiens
ELRFFPDMIPVSSIYMDSRAGCSKSCEAAQYWSSGFTVLQASIDAAIIQLKTNVSLWKELESTKAVIMGETAVVEIDTFPRGVILIYLVIAFSPFGYFLAIHIVAEKEKKIKEFLKIMGLHDTAFWLSWVLLYTSLIFLMSLLMAVIATASLLFPQSSSIVIFLLFFLYGLSSVSILTCDRNKELSKCLIT

SEQ ID NO: 3488 - protein, 1622 aa, Homo sapiens
MATLACRVQFLDDTDPFNSTNFPEPSRPPLFTFREDLALGTQLAGVHRLLQAPHKLDDCTLQLSHNGAYLDLEATLAEQRDELEGFQDDAGRGKKHSIILRTQLSVRVHACIEKLYNSSGRDLRRALFSLKQIFQDDKDLVHEFVVAEGLTCLIKVGAEADQNYQNYILRALGQIMLYVDGMNGVINRNETIQWLYTLIGSKFRLVVKTALKLLLVFVEYSESNAPLLIQAVTAVDTKRGVKPWSNIMEILEEKDGVDTELLVYAMTLVNKTLSGLPDQDTFYDVVDCLEELGIAAVSQRHLNKKGTDLDLVEQLNIYEVALRHEDGDETTEPPPSGCRDRRRASVCSSGGGEHRGLDRRRSRRHSVQSIKSTLSAPTSPCSQSAPSFKPNQVRDLREKEEEEEEEQPITEPSSEEEREDDASCQGKDSKVGAASGQSPTGRDAAPKSSALPAVSNASSQGKPLLVGTAGGTTWHSGSSGSEATPSALLSPPASAARPSSATPGSLKVSPTIDKLPYVPHSPFHLFSYDFEDSSLSTKEKEAESQKENSSSDSFSLSTYSASEPYHFRSFSSNRYSNFGNNSYHSSRPSSGSSVPTTPTSSVSPPQEARLERSSPSGLLTSSFRQHQESLAAERERRRQEREERLQRIEREERNKFSRDYLDKREEQRQAREERYKYLEQLAAEEHEKELRSRSVSRGRADLSLDLTSPAAPACLAPLSHSPSSSDSQEALTVSASSPGTPHHPQASAGDPEPESEAEPEAEAGAGQVADEAGQDIASAHEGAETEVEQALEQEPEERASLSEKERQNEGVNERDNCSASSVSSSSSTLEREEKEDKLSRDRTTGLWPAGVQDAGVNGQCGDILTNKRFMLDMLYAHNRKSPDDEEKGDGEAGRTQQEAEAVASLATRISTLQANSQTQDESVRRVDVGCLDNRGSVKAFAEKFNSGDLGRGSISPDAEPNDKVPETAPVQPKTESDYIWDQLMANPRELRIQDMDFTDLGEEDDIDVLDVDLGHREAPGPPPPPPPTFLGLPPPPPPPLLDSIPPPPVPGNLLVPPPPVFNAPQGLGWSQVPRGQPTFTKKKKTIRLFWNEVRPFDWPCKNNRRCREFLWSKLEPIKVDTSRLEHLFESKSKELSVSKKTAADGKRQEIIVLDSKRSNAINIGLTVLPPPRTIKIAILNFDEYALNKEGIEKILTMIPTDEEKQKIQEAQLANPEIPLGSAEQFLLTLSSISELSARLHLWAFKMDYETTEKEVAEPLLDLKEGIDQLENNKTLGFILSTLLAIGNFLNGTNAKAFELSYLEKVPEVKDTVHKQSLLHHVCTMVVENFPDSSDLYSEIGAITRSAKVDFDQLQDNLCQMERRCKASWDHLKAIAKHEMKPVLKQRMSEFLKDCAERIIILKIVHRRIINRFHSFLLFMGHPPYAIREVNINKFCRIISEFALEYRTTRERVLQQKQKRANHRERNKTRGKMITDTDEEEEVESGKFSGSSPAPPSQPQGLSYAEDAAEHENMKAVLKTSSPSVEDATPALGVRTRSRASRGSTSSWTMGTDDSPNVTDDAADEIMDRIVKSATQVPSQRVVPRERKRSRANRKSLRRTLKSGLTPEEARALGLVGTSELQL

SEQ ID NO: 3489 - protein, 1147 aa, Homo sapiens
APKTKKGCKGSIDDFLGDLLGDDMTLPEKPVKLASHTRDTTGVSQMFPSSKARTKSLLGDDVFSTMAGLEEADAEVSGISEADPQALLQAMKDLDGMDADILGLKKSNSAPSKKAAKDPGKGELPNHPKPAGGAIPTKKSLPSPSSSGHQNRRFSSEDLEDPLRGLLSYDEGGITKQPPVTQSKTASDKSPSTVRDQGPSIPLTPGDTPIRKKEELLFDDGDDIMATLGFGDSPKAEKRQIGDQEGPRPARSTLDELLGRGMATKLLARPGTGEHREFKLDKKYQRPQDSEDMWGDEDFTFGAYQPTVVSSEGRQSRRQSVSRFFADSGADPKGEPGSKQSPPMASSPIQPRKGGADWLGLKDEDLDLFPASPTREAHRESSVPVTPSVPPPASQHSTPAGLPPSRAKPPTEGAGSPAKASQASKLRASKEEKEDWLSHALSRKKSQGLAREQHAGTSEGLHLAGTAGHPPSGSQPLTSTQGLEHAAAGGSSGTTARERPCVRPGVSGSPVTQNHAASALPTGSPKRGTAPGDLSATEPATCFPSTQKPTEPSVPVQPLLPESLARSLLPSTEYQKQLLAAQVQLQCSPAELQAELLHSQARLAELEAQVRKLELERAQHELLLGSLQQQHQADLELIESAHRSRIKVLETSYQQREERLRRENEELSARYLSQCQEAEQARAELTAQHQRRLAAIAQEKDQEMERLRELQRASILDMRRDHEEQLQRLKLLKDREVDAATSATSHTRSLNSIIHQMEKFSSSLHELSSRVEASHLTTSQERELGIRQRDEQLRALQERLGQQQRDMEEERSRQQEVIGKMEARLNEQSRLLEQERWRVTAEQSKAESMQRALEEQRKVTAQQMAMERAELERAKSALLEEQKSVMLKCGEERRRLAAEWAEFSAQQKLSKERAEREAERALQVDTQREGTLISLAKEQAELKIRASELRAEEKQLAAERAALEQERQELRLEKERINATALRVKLRAEEVESMSKVASEKYEEGERALREAQQVQAEQQARLQAVQQQQERLRKQEQHMHQEHLSLAQQRLQLDRARQDLPSSLVGLFPRAQGPAASSQSALMPPAPTTRWCSQPPTGLDPSPLHLHARLALLRHMAEQDRDFLENEQFFLETLKKGSYNLTSHSA

SEQ ID NO: 3490 - protein, 841 aa, Homo sapiens
MAQVLHVPAPFPGTPGPASPPAFPAKDPDPPYSVETPYGYRLDLDFLKYVDDIEKGHTLRRVAVQRRPRLSSLPRGPGSWWTSTESLCSNASGDSRHSAYSYCGRGFYPQYGALETRGGFNPRVERTLLDARRRLEDQAATPTGLGSLTPSAAGSTASLVGVGLPPPTPRSSGLSTPVPPSAGHLAHVREQMAGALRKLRQLEEQVKLIPVLQVKLSVLQEEKRQLTVQLKSQKFLGHPTAGRGRSELCLDLPDPPEDPVALETRSVGTWVRERDLGMPDGEAALAAKVAVLETQLKKALQELQAAQARQADPQPQAWPPPDSPVRVDTVRVVEGPREVEVVASTAAGAPAQRAQSLEPYGTGLRALAMPGRPESPPVFRSQEVVETMCPVPAAATSNVHMVKKISITERSCDGAAGLPEVPAESSSSPPGSEVASLTQPEKSTGRVPTQEPTHREPTRQAASQESEEAGGTGGPPAGVRSIMKRKEEVADPTAHRRSLQFVGVNGGYESSSEDSSTAENISDNDSTENEAPEPRERVPSVAEAPQLRPAGTAAAKTSRQECQLSRESQHIPTAEGASGSNTEEEIRMELSPDLISACLALEKYLDNPNALTERELKVAYTTVLQEWLRLACRSDAHPELVRRHLVTFRAMSARLLDYVVNIADSNGNTALHYSVSHANFPVVQQLLDSGVCKVDKQNRAGYSPIMLTALATLKTQDDIETVLQLFRLGNINAKASQAGQTALMLAVSHGRVDVVKALLACEADVNVQDDDGSTALMCACEHGHKEIAGLLLAVPSCDISLTDRDGSTALMVALDAGQSEIASMLYSRMNIKCSVSLNPAG

SEQ ID NO: 3491 - protein, 2075 aa, Homo sapiens
GAECPHQNKTVLHMDGCLDTETPTVSIQENVDVASLKPISDSGINFTDAIWSPTCERRTCECHESIEKNKDKTDLPQSVVYQNEEGRWVTDLAYYTSFNSKQNLNVSLSDEMNEDFRSGSEAFDLIAQDEEEFNKEHQFIQPSFGYFIRSPEKREPIALIRKSDVSRGNLEKEMAHLNHDLYSGDLNEQSQAQLSEGSITLQVEAVESTSQVDENDVTLTADKGKTEDTFFMSNKPQRYKDKLPDSGDSMLRISTIASAIAEASVNTDPSQLAAMIKALSNKTRDKTFQEDEKQKDYSHVRHFLPNDLEKSNGSNALDMEKYLKKTEVSRYESALENFSRASMSDTWDLSLPKEQTTQDIHPVDLSATSVSVRAPEENTAAIVYVENGESENQESFRTINSSNSVTNRENNSAVVDVKTCSIDNKLQDVGNDEKATSISTPSDSYSSVRNPRITSLCLLKDCEEIRDNRENQRQNECVSEISNSEKHVTFENHRIVSPKNSDLKNTSPEHGGRGSEDEQESFRPSTSPLSHSSPSEISGTSSSGCALESFGSAAQQQQPPCEQELSPLVCSPAGVSRLTYVSEPESSYPTTATDDALEDRKSDITSELSTTIIQGSPAALEERAMEKLREKVPFQNRGKGTLSSIIQNNSDTRKATETTSLSSKPEYVKPDFRWSKDPSSKSGNLLETSEVGWTSNPEELDPIRLALLGKSGLSCQVGSATSHPVSCQEPIDEDQRISPKDKSTAGREFSGQVSHQTTSENQCTPIPSSTVHSSVADMQNMPAAVHALLTQPSLSAAPFAQRYLGTLPSTGSTTLPQCHAGNATVCGFSGGLPYPAVAGEPVQNSVAVGICLGSNIGSGWMGTSSLCNPYSNTLNQNLLSTTKPFPVPSVGTNCGIEPWDSGVTSGLGSVRVPEELKLPHACCVGIASQTLLSVLNPTDRWLQVSIGVLSISVNGEKVDLSTYRCLVFKNKAIIRPHATEEIKVLFIPSSPGVFRCTFSVASWPCSTDAETIVQAEALASTVTLTAIAESPVIEVETEKKDVLDFGDLTYGGWKALPLKLINRTHATVPIRLIINANAVAWRCFTFSKESVRAPVEVAPCADVVTRLAGPSVVNHMMPASYDGQDPEFLMIWVLFHSPKKQISSSDILDSAEEFSAKVDIEVDSPNPTPVLRSVSLRARAGIARIHAPRDLQTMHFLAKVASSRKQHLPLKNAGNIEVYLDIKVPEQGSHFSVDPKNLLLKPGEEHEVIVSFTPKDPEACEERILKIFVQPFGPQYEVVLKGEVISSGSKPLSPGPCLDIPSILSNKQFLAWGGVPLGRTQLQKLALRNNSASTTQHLRLLIRGQDQDCFQLQNTFGSEQRLTSNCEIRIHPKEDIFISVLFAPTRLSCMLARLEIKQLGNRSQPGIKFTIPLSGYGGTSNLILEGVKKLSDSYMVTVNGLVPGKESKIVFSVRNTGSRAAFVKAVGFKDSQKKVLLDPKVLRIFPDKFVLKERTQENVTLIYNPSDRGINNKTATELSTVYLFGGDEISRQQYRRALLHKPEMIKQILPEHSVLQNINFVEAFQDELLVTEVYDLPQRPNDVQLFYGSMCKIILSVIGEFRDCISSREFLQPSSKASLESTSDLGASGKHGGNVSLDVLPVKGPQGSPLLSRAARPPLDQLASEEPWTVLPEHLILVAPSPCDMAKTGRFQIVNNSVRLLRFELCWPAHCLTVTPQHGCVAPESKLQILVSPNSSLSTKQSMFPWSGLIYIHCDDGQKKIVKVQIREDLTQVELLTRLTSKPFGILSPVSEPSVSHLVKPMTKPPSTKVEIRNKSITFPTTEPGETSESCLELENHGTTDVKWHLSSLAPPYVKGVDESGDVFRATYAAFRCSPISGLLESHGIQKVSITFLPRGRGDYAQFWDVECHPLKEPHMKHTLRFQLSGQSIEAENEPENACLSTDSLIKIDHLVKPRRQAVSEASARIPEQLDVTARGVYAPEDVYRFRPTSVGESRTLKVNLRNNSFITHSLKFLSPREPFYVKHSKYSLRAQHYINMPVQFKPKSAGKFEALLVIQTDEGKSIAIRLIGEALGKN

SEQ ID NO: 3492 - protein, 107 aa, Homo sapiens
MDPLGAAKPQWPWRRCLAALLFQLLVAVCFFSYLRVSRDDATGSPRAPSGSSRQDTTPTRPTLLILLRTWPFHIPVALSRCSEMVPGTADCHITADRKVYPQADMVI

SEQ ID NO: 3493 - protein, 286 aa, Homo sapiens
MEPPDAPAQARGAPRLLLLAVLLAAHPDAQAEVRLSVPPLVEVMRGKSVILDCTPTGTHDHYMLEWFLVTMHDTRGRSPPYQLDSQGRLVLAEAQVGDERDYVCVVRAGAAGTAEATARLNVFAKPEATEVSPNKGTLSVMEDSAQEIATCNSRNGNPAPKITWYRNGQRLEVPVEMNPEGYMTSRTVREASGLLSLTSTLYLRLRKDDRDASFHCAAHYSLPEGRHGRLDSPTFHLTLHYPTEHVQFWVGSPSTPAGWVREGDTVQLLCRGDGSPSPEYTLFRLQ

SEQ ID NO: 3494 - protein, 32759 aa, Homo sapiens
MTTQAPTFTQPLQSVVVLEGSTATFEAHISGFPVPEVSWFRDGQVISTSTLPGVQISFSDGRAKLTIPAVTKANSGRYSLKATNGSGQATSTAELLVKAETAPPNFVQRLQSMTVRQGSQVRLQVRVTGIPTPVVKFYRDGAEIQSSLDFQISQEGDLYSLLIAEAYPEDSGTYSVNATNSVGRATSTAELLVQGEEEVPAKKTKTIVSTAQISESRQTRIEKKIEAHFDARSIATVEMVIDGAAGQQLPHKTPPRIPPKPKSRSPTPPSIAAKAQLARQQSPSPIRHSPSPVRHVRAPTPSPVRSVSPAARISTSPIRSVRSPLLMRKTQASTVATGPEVPPPWKQEGYVASSSEAEMRETTLTTSTQIRTEERWEGRYGVQEQVTISGAAGAAASVSASASYAAEAVATGAKEVKQDADKSAAVATVVAAVDMARVREPVISAVEQTAQRTTTTAVHIQPAQEQVRKEAEKTAVTKVVVAADKAKEQELKSRTKEVITTKQEQMHVTHEQIRKETEKTFVPKVVISAAKAKEQETRISEEITKKQKQVTQEAIRQETEITAASMVVVATAKSTKLETVPGAQEETTTQQDQMHLSYEKIMKETRKTVVPKVIVATPKVKEQDLVSRGREGITTKREQVQITQEKMRKEAEKTALSTIAVATAKAKEQETILRTRETMATRQEQIQVTHGKVDVGKKAEAVATVVAAVDQARVREPREPGHLEESYAQQTTLEYGYKERISAAKVAEPPQRPASEPHVVPKAVKPRVIQAPSETHIKTTDQKGMHISSQIKKTTDLTTERLVHVDKRPRTASPHFTVSKISVPKTEHGYEASIAGSAIATLQKELSATSSAQKITKSVKAPTVKPSETRVRAEPTPLPQFPFADTPDTYKSEAGVEVKKEVGVSITGTTVREERFEVLHGREAKVTETARVPAPVEIPVTPPTLVSGLKNVTVIEGESVTLECHISGYPSPTVTWYREDYQIESSIDFQITFQSGIARLMIREAFAEDSGRFTCSAVNEAGTVSTSCYLAVQVSEEFEKETTAVTEKFTTEEKRFVESRDVVMTDTSLTEEQAGPGEPAAPYFITKPVVQKLVEGGSVVFGCQVGGNPKPHVYWKKSGVPLTTGYRYKVSYNKQTGECKLVISMTFADDAGEYTIVVRNKHGETSASASLLEEADYELLMKSQQEMLYQTQVTAFVQEPKVGETAPGFVYSEYEKEYEKEQALIRKKMAKDTVVVRTYVEDQEFHISSFEERLIKEIEYRIIKTTLEELLEEDGEEKMAVDISESEAVESGFDSRIKNYRILEGMGVTFHCKMSGYPLPKIAWYKDGKRIKHGERYQMDFLQDGRASLRIPVVLPEDEGIYTAFASNIKGNAICSGKLYVEPAAPLGAPTYIPTLEPVSRIRSLSPRSVSRSPIRMSPARMSPARMSPARMSPARMSPGRRLEETDESQLERLYKPVFVLKPVSFKCLEGQTARFDLKVVGRPMPETFWFHDGQQIVNDYTHKVVIKEDGTQSLIIVPATPSDSGEWTVVAQNRAGRSSISVILTVEAVEHQVKPMFVEKLKNVNIKEGSRLEMKVRATGNPNPDIVWLKNSDIIVPHKYPKIRIEGTKGEAALKIDSTVSQDSAWYTATAINKAGRDTTRCKVNVEVEFAEPEPERKLIIPRGTYRAKEIAAPELEPLHLRYGQEQWEEGDLYDKEKQQKPFFKKKLTSLRLKRFGPAHFECRLTPIGDPTMVVEWLHDGKPLEAANRLRMINEFGYCSLDYGVAYSRDSGIITCRATNKYGTDHTSATLIVKDEKSLVEESQLPEGRKGLQRIEELERMAHEGALTGVTTDQKEKQKPDIVLYPEPVRVLEGETARFRCRVTGYPQPKVNWYLNGQLIRKSKRFRVRYDGIHYLDIVDCKSYDTGEVKVTAENPEGVIEHKVKLEIQQREDFRSVLRRAPEPRPEFHVHEPGKLQFEVQKVDRPVDTTETKEVVKLKRAERITHEKVPEESEELRSKFKRRTEEGYYEAITAVELKSRKKDESYEELLRKTKDELLHWTKELTEEEKKALAEEGKITIPTFKPDKIELSPSMEAPKIFERIQSQTVGQGSDAHFRVRVVGKPDPECEWYKNGVKIERSDRIYWYWPEDNVCELVIRDVTAEDSASIMVKAINIAGETSSHAFLLVQAKQLITFTQELQDVVAKEKDTMATFECETSEPFVKVKWYKDGMEVHEGDKYRMHSDRKVHFLSILTIDTSDAEDYSCVLVEDENVKTTAKLIVEGAVVEFVKELQDIEVPESYSGELECIVSPENIEGKWYHNDVELKSNGKYTITSRRGRQNLTVKDVTKEDQGEYSFVIDGKKTTCKLKMKPRPIAILQGLSDQKVCEGDIVQLEVKVSLESVEGVWMKDGQEVQPSDRVHIVIDKQSHMLLIEDMTKEDAGNYSFTIPALGLSTSGRVSVYSVDVITPLKDVNVIEGTKAVLECKVSVPDVTSVKWYLNDEQIKPDDRVQAIVKGTKQRLVINRTHASDEGPYKLIVGRVETNCNLSVEKIKIIRGLRDLTCTETQNVVFEVELSHSGIDVLWNFKDKEIKPSSKYKIEAHGKIYKLTVLNMMKDDEGKYTFYAGENMTSGKLTVAGGAISKPLTDQTVAESQEAVFECEVANPDSKGEWLRDGKHLPLTNNIRSESDGHKRRLIIAATKLDDIGEYTYKVATSKTSAKLKVEAVKIKKTLKNLTVTETQDAVFTVELTHPNVKGVQWIKNGVVLESNEKYAISVKGTIYSLRIKNCAIVDESVYGFRLGRLGASARLHVETVKIIKKPKDVTALENATVAFEVSVSHDTVPVKWFHKSVEIKPSDKHRLVSERKVHKLMLQNISPSDAGEYTAVVGQLECKAKLFVETLHITKTMKNIEVPETKTASFECEVSHFNVPSMWLKNGVEIEMSEKFKIVVQGKLHQLIIMNTSTEDSAEYTFVCGNDQVSATLTVTPIMITSMLKDINAEEKDTITFEVTVNYEGISYKWLKNGVEIKSTDKCQMRTKKLTHSLNIRNVHFGDAADYTFVAGKATSTATLYVEARHIEFRKHIKDIKVLEKKRAMFECEVSEPDITVQWMKDDQELQITDRIKIQKEKYVHRLLIPSTRMSDAGKYTVVAGGNVSTAKLFVEGRDVRIRSIKKEVQVIEKQRAVVEFEVNEDDVDAHWYKDGIEINFQVQERHKYVVERRIHRMFISETRQSDAGEYTFVAGRNRSSVTLYVNAPEPPQVLQELQPVTVQSGKPARFCAVISGRPQPKISWYKEEQLLSTGFKCKFLHDGQEYTLLLIEAFPEDAAVYTCEAKNDYGVATTSASLSVEVPEVVSPDQEMPVYPPAIITPLQDTVTSEGQPARFQCRVSGTDLKVSWYSKDKKIKPSRFFRMTQFEDTYQLEIAEAYPEDEGTYTFVASNAVGQVSSTANLSLEGFSKFEENTSNSQWHVSLSVSFKKEPLGQKPSFIQPLSSLRVHNGETVRFHARVSGIPKPEIQWFHNQQLILPTKDVVFHFEESTGMALMLIVDAYSEHAGQYSCKAANSAGEATCAATLTVTPKVQALDRQSSGKDVRESTKSQAVADSSFTKEESKISQKEIKSFQGSSYEYEVQVFESVSQSSIHTAASVQDTQLCHTASLSQIAESTELSKECAKESTGEAPKIFLHLQDVTVKCGDTAQFLCVLKDDSFIDVTWTHEGAKIEESERLKQSQNGNIQFLTICNVQLVDQGLYSCIVHNDCGERTTSAVLSVEGAPESILHERIEQEIEMEMKEFSSSFLSAEEEGLHSAELQLSKINETLELLSESPVYPTKFDSEKEGTGPIFIKEVSNADISMGDVATLSVTVIGIPKPKIQWFFNGVLLTPSADYKFVFDGDDHSLIILFTKLEDEGEYTCMASNDYGKTICSAYLKINSKGEGHKDTETESAVAKSLEKLGGPCPPHFLKELKPIRCAQGLPAIFEYTVVGEPAPTVTWFKENKQLCTSVYYTIIHNPNGSGTFIVNDPQREDSGLYICKAENMLGESTCAAELLVLLEDTDMTDTPCKAKSTPEAPEDFPQTPLKGPAVEALDSEQEIATFVKDTILKAALITEENQQLSYEHIAKANELSSQLPLGAQELQSILEQDKLTPESTREFLCINGSIHFQPLKEPSPNLQLQIVQSQKTFSKEGILMPEEPETQAVLSDTEKIFPSAMSIEQINSLTVEPLKTLLAEPEGNYPQSSIEPPMHSYLTSVAEEVLSPKEKTVSDTNREQRVTLQKQEAQSALILSQSLAEGHVESLQSPDVMISQVNYEPLVPSEHSCTEGGKILIESANPLENAGQDSAVRIEEGKSLRFPLALEEKQVLLKEEHSDNVVMPPDQIIESKREPVAIKKVQEVQGRDLLSKESLLSGIPEEQRLNLKIQICRALQAAVASEQPGLFSEWLRNIEKVEVEAVNITQEPRHIMCMYLVTSAKSVTEEVTIIIEDVDPQMANLKMELRDALCAIIYEEIDILTAEGPRIQQGAKTSLQEEMDSFSGSQKVEPITEPEVESKYLISTEEVSYFNVQSRVKYLDATPVTKGVASAVVSDEKQDESLKPSEEKEESSSESGTEEVATVKIQEAEGGLIKEDGPMIHTPLVDTVSEEGDIVHLTTSITNAKEVNWYFENKLVPSDEKFKCLQDQNTYTLVIDKVNTEDHQGEYVCEALNDSGKTATSAKLTVVKRAAPVIKRKIEPLEVALGHLAKFTCEIQSAPNVRFQWFKAGREIYESDKCSIRSSKYISSLEILRTQVVDCGEYTCKASNEYGSVSCTATLTVTEAYPPTFLSRPKSLTTFVGKAAKFICTVTGTPVIETIWQKDGAALSPSPNWRISDAENKHILELSNLTIQDRGVYSCKASNKFGADICQAELIIIDKPHFIKELEPVQSAINKKVHLECQVDEDRKVTVTWSKDGQKLPPGKDYKICFEDKIATLEIPLAKLKDSGTYVCTASNEAGSSSCSATVTVREPPSFVKKVDPSYLMLPGESARLHCKLKGSPVIQVTWFKNNKELSESNTVRMYFVNSEAILDITDVKVEDSGSYSCEAVNDVGSDSCSTEIVIKEPPSFIKTLEPADIVRGTNALLQCEVSGTGPFEISWFKDKKQIRSSKKYRLFSQKSLVCLEIFSFNSADVGEYECVVANEVGKCGCMATHLLKEPPTFVKKVDDLIALGGQTVTLQAAVRGSEPISVTWMKGQEVIREDGKIKMSFSNGVAVLIIPDVQISFGGKYTCLAENEAGSQTSVGELIVKEPAKIIERAELIQVTAGDPATLEYTVAGTPELKPKWYKDGRPLVASKKYRISFKNNVAQLKFYSAELHDSGQYTFEISNEVGSSSCETTFTVLDRDIAPFFTKPLRNVDSVVNGTCRLDCKIAGSLPMRVSWFKDGKEIAASDRYRIAFVEGTASLEIIRVDMNDAGNFTCRATNSVGSKDSSGALIVQEPPSFVTKPGSKDVLPGSAVCLKSTFQGSTPLTIRWFKGNKELVSGGSCYITKEALESSLELYLVKTSDSGTYTCKVSNVAGGVECSANLFVKEPATFVEKLEPSQLLKKGDATQLACKVTGTPPIKITWFANDREIKESSKHRMSFVESTAVLRLTDVGIEDSGEYMCEAQNEAGSDHCSSIVIVKESPYFTKEFKPIEVLKEYDVMLLAEVAGTPPFEITWFKDNTILRSGRKYKTFIQDHLVSLQILKFVAADAGEYQCRVTNEVGSSICSARVTLREPPSFIKKIESTSSLRGGTAAFQATLKGSLPITVTWLKDSDEITEDDNIRMTFENNVASLYLSGIEVKHDGKYVCQAKNDAGIQRCSALLSVKEPATITEEAVSIDVTQGDPATLQVKFSGTKEITAKWFKDGQELTLGSKYKISVTDTVSILKIISTEKKDSGEYTFEVQNDVGRSSCKARINVLDLIIPPSFTKKLKKMDSIKGSFIDLECIVAGSHPISIQWFKDDQEISASEKYKFSFHDNTAFLEISQLEGTDSGTYTCSATNKAGHNQCSGHLTVKEPPYFVEKPQSQDVNPNTRVQLKALVGGTAPMTIKWFKDNKELHSGAARSVWKDDTSTSLELFAAKATDSGTYICQLSNDVGTATSKATLFVKEPPQFIKKPSPVLVLRNGQSTTFECQITGTPKIRVSWYLDGNEITAIQKHGISFIDGLATFQISGARVENSGTYVCEARNDAGTASCSIELKVKEPPTFIRELKPVEVVKYSDVELECEVTGTPPFEVTWLKNNREIRSSKKYTLTDRVSVFNLHITKCDPSDTGEYQCIVSNEGGSCSCSTRVALKEPPSFIKKIENTTTVLKSSATFQSTVAGSPPISITWLKDDQILDEDDNVYISFVDSVATLQIRSVDNGHSGRYTCQAKNESGVERCYAFLLVQEPAQIVEKAKSVDVTEKDPMTLECVVAGTPELKVKWLKDGKQIVPSRYFSMSFENNVASFRIQSVMKQDSGQYTFKVENDFGSSSCDAYLRVLDQNIPPSFTKKLTKMDKVLGSSIHMECKVSGSLPISAQWFKDGKEISTSAKYRLVCHERSVSLEVNNLELEDTANYTCKVSNVAGDDACSGILTVKEPPSFLVKPGRQQAIPDSTVEFKAILKGTPPFKIKWFKDDVELVSGPKCFIGLEGSTSFLNLYSVDASKTGQYTCHVTNDVGSDSCTTMLLVTEPPKFVKKLEASKIVKAGDSSRLECKIAGSPEIRVVWFRNEHELPASDKYRMTFIDSVAVIQMNNLSTEDSGDFICEAQNPAGSTSCSTKVIVKEPPVFSSFPPIVETLKNAEVSLECELSGTPPFEVVWYKDKRQLRSSKKYKIASKNFHTSIHILNVDTSDIGEYHCKAQNEVGSDTCVCTVKLKEPPRFVSKLNSLTVVAGEPAELQASIEGAQPIFVQWLKEKEEVIRESENIRITFVENVATLQFAKAEPANAGKYICQIKNDGGMRENMATLMVLEPAVIVEKAGPMTVTVGETCTLECKVAGTPELSVEWYKDGKLLTSSQKHKFSFYNKISSLRILSVERQDAGTYTFQVQNNVGKSSCTAVVDVSDRAVPPSFTRRLKNTGGVLGASCILECKVAGSSPISVAWFHEKTKIVSGAKYQTTFSDNVCTLQLNSLDSSDMGNYTCVAANVAGSDECRAVLTVQEPPSFVKEPEPLEVLPGKNVTFTSVIRGTPPFKVNWFRGARELVKGDRCNIYFEDTVAELELFNIDISQSGEYTCVVSNNAGQASCTTRLFVKEPAAFLKRLSDHSVEPGKSIILESTYTGTLPISVTWKKDGFNITTSEKCNIVTTEKTCILEILNSTKRDAGQYSCEIENEAGRDVCGALVSTLEPPYFVTELEPLEAAVGDSVSLQCQVAGTPEITVSWYKGDTKLRPTPEYRTYFTNNVATLVFNKVNINDSGEYTCKAENSIGTASSKTVFRIQERQLPPSFARQLKDIEQTVGLPVTLTCRLNGSAPIQVCWYRDGVLLRDDENLQTSFVDNVATLKILQTDLSHSGQYSCSASNPLGTASSSARLTAREPKKSPFFDIKPVSIDVIAGESADFECHVTGAQPMRITWSKDNKEIRPGGNYTITCVGNTPHLRILKVGKGDSGQYTCQATNDVGKDMCSAQLSVKEPPKFVKKLEASKVAKQGESIQLECKISGSPEIKVSWFRNDSELHESWKYNMSFINSVALLTINEASAEDSGDYICEAHNGVGDASCSTALTVKAPPVFTQKPSPVGALKGSDVILQCEISGTPPFEVVWVKDRKQVRNSKKFKITSKHFDTSLHILNLEASDVGEYHCKATNEVGSDTCSCSVKFKEPPRFVKKLSDTSTLIGDAVELRAIVEGFQPISVVWLKDRGEVIRESENTRISFIDNIATLQLGSPEASNSGKYICQIKNDAGMRECSAVLTVLEPARIIEKPEPMTVTTGNPFALECVVTGTPELSAKWFKDGRELSADSKHHITFINKVASLKIPCAEMSDKGLYSFEVKNSVGKSNCTVSVHVSDRIVPPSFIRKLKDVNAILGASVVLECRVSGSAPISVGWFQDGNEIVSGPKCQSSFSENVCTLNLSLLEPSDTGIYTCVAANVAGSDECSAVLTVQEPPSFEQTPDSVEVLPGMSLTFTSVIRGTPPFKVKWFKGSRELVPGESCNISLEDFVTELELFEVQPLESGDYSCLVTNDAGSASCTTHLFVKEPATFVKRLADFSVETGSPIVLEATYTGTPPISVSWIKDEYLISQSERCSITMTEKSTILEILESTIEDYAQYSCLIENEAGQDICEALVSVLEPPYFIEPLEHVEAVIGEPATLQCKVDGTPEIRISWYKEHTKLRSAPAYKMQFKNNVASLVINKVDHSDVGEYSCKADNSVGAVASSAVLVIKARKLPPFFARKLKDVHETLGFPVAFECRINGSEPLQVSWYKDGVLLKDDANLQTSFVHNVATLQILQTDQSHIGQYNCSASNPLGTASSSAKLILSEHEVPPFFDLKPVSVDLALGESGTFKCHVTGTAPIKITWAKDNREIRPGGNYKMTLVENTATLTVLKVGKGDAGQYTCYASNIAGKDSCSAQLGVQEPPRFIKKLEPSRIVKQDEFTRYECKIGGSPEIKVLWYKDETEIQESSKFRMSFVDSVAVLEMHNLSVEDSGDYTCEAHNAAGSASSSTSLKVKEPPIFRKKPHPIETLKGADVHLECELQGTPPFHVSWYKDKRELRSGKKYKIMSENFLTSIHILNVDAADIGEYQCKATNDVGSDTCVGSIALKAPPRFVKKLSDISTVVGKEVQLQTTIEGAEPISVVWFKDKGEIVRESDNIWISYSENIATLQFSRVEPANAGKYTCQIKNDAGMQECFATLSVLEPATIVEKPESIKVTTGDTCTLECTVAGTPELSTKWFKDGKELTSDNKYKISFFNKVSGLKIINVAPSDSGVYSFEVQNPVGKDSCTASLQVSDRTVPPSFTRKLKETNGLSGSSVVMECKVYGSPPISVSWFHEGNEISSGRKYQTTLTDNTCALTVNMLEESDSGDYTCIATNMAGSDECSAPLTVREPPSFVQKPDPMDVLTGTNVTFTSIVKGTPPFSVSWFKGSSELVPGDRCNVSLEDSVAELELFDVDTSQSGEYTCIVSNEAGKASCTTHLYIKAPAKFVKRLNDYSIEKGKPLILEGTFTGTPPISVTWKKNGINVTPSQRCNITTTEKSAILEIPSSTVEDAGQYNCYIENASGKDSCSAQILILEPPYFVKQLEPVKVSVGDSASLQCQLAGTPEIGVSWYKGDTKLRPTTTYKMHFRNNVATLVFNQVDINDSGEYICKAENSVGEVSASTFLTVQEQKLPPSFSRQLRDVQETVGLPVVFDCAISGSEPISVSWYKDGKPLKDSPNVQTSFLDNTATLNIFKTDRSLAGQYSCTATNPIGSASSSARLILTEGKNPPFFDIRLAPVDAVVGESADFECHVTGTQPIKVSWAKDSREIRSGGKYQISYLENSAHLTVLKVDKGDSGQYTCYAVNEVGKDSCTAQLNIKERLIPPSFTKRLSETVEETEGNSFKLEGRVAGSQPITVAWYKNNIEIQPTSNCEITFKNNTLVLQVRKAGMNDAGLYTCKVSNDAGSALCTSSIVIKEPKKPPVFDQHLTPVTVSEGEYVQLSCHVQGSEPIRIQWLKAGREIKPSDRCSFSFASGTAVLELRDVAKADSGDYVCKASNVAGSDTTKSKVTIKDKPAVAPATKKAAVDGRLFFVSEPQSIRVVEKTTATFIAKVGGDPIPNVKWTKGKWRQLNQGGRVFIHQKGDEAKLEIRDTTKTDSGLYRCVAFNEHGEIESNVNLQVDERKKQEKIEGDLRAMLKKTPILKKGAGEEEEIDIMELLKNVDPKEYEKYARMYGITDFRGLLQAFELLKQSQEEETHRLEIEEIERSERDEKEFEELVSFIQQRLSQTEPVTLIKDIENQTVLKDNDAVFEIDIKINYPEIKLSWYKGTEKLEPSDKFEISIDGDRHTLRVKNCQLKDQGNYRLVCGPHIASAKLTVIEPAWERHLQDVTLKEGQTCTMTCQFSVPNVKSEWFRNGRILKPQGRHKTEVEHKVHKLTIADVRAEDQGQYTCKYEDLETSAELRIEAEPIQFTKRIQNIVVSEHQSATFECEVSFDDAIVTWYKGPTELTESQKYNFRNDGRCHYMTIHNVTPDDEGVYSVIARLEPRGEARSTAELYLTTKEIKLELKPPDIPDSRVPIPTMPIRAVPPEEIPPVVAPPIPLLLPTPEEKKPPPKRIEVTKKAVKKDAKKVVAKPKEMTPREEIVKKPPPPTTLIPAKAPEIIDVSSKAEEVKIMTITRKKEVQKEKEAVYEKKQAVHKEKRVFIESFEEPYDELEVEPYTEPFEQPYYEEPDEDYEEIKVEAKKEVHEEWEEDFEEGQEYYEREEGYDEGEEEWEEAYQEREVIQVQKEVYEESHERKVPAKVPEKKAPPPPKVIKKPVIEKIEKTSRRMEEEKVQVTKVPEVSKKIVPQKPSRTPVQEEVIEVKVPAVHTKKMVISEEKMFFASHTEEEVSVTVPEVQKEIVTEEKIHVAISKRVEPPPKVPELPEKPAPEEVAPVPIPKKVEPPAPKVPEVPKKPVPEEKKPVPVPKKEPAAPPKVPEVPKKPVPEEKIPVPVAKKKEAPPAKVPEVQKGVVTEEKITIVTQREESPPPAVPEIPKKKVPEERKPVPRKEEEVPPPPKVPALPKKPVPEEKVAVPVPVAKKAPPPRAEVSKKTVVEEKRFVAEEKLSFAVPQRVEVTRHEVSAEEEWSYSEEEEGVSISVYREEEREEEEEAEVTEYEVMEEPEEYVVEEKLHIISKRVEAEPAEVTERQEKKIVLKPKIPAKIEEPPPAKVPEAPKKIVPEKKVPAPVPKKEKVPPPKVPEEPKKPVPEKKVPPKVIKMEEPLPAKVTERHMQITQEEKVLVAVTKKEAPPKARVPEEPKRAVPEEKVLKLKPKREEEPPAKVTEFRKRVVKEEKVSIEAPKREPQPIKEVTIMEEKERAYTLEEEAVSVQREEEYEEYEEYDYKEFEEYEPTEEYDQYEEYEEREYERYEEHEEYITEPEKPIPVKPVPEEPVPTKPKAPPAKVLKKAVPEEKVPVPIPKKLKPPPPKVPEEPKKVFEEKIRISITKREKEQVTEPAAKVPMKPKRVVAEEKVPVPRKEVAPPVRVPEVPKELEPEEVAFEEEVVTHVEEYLVEEEEEYIHEEEEFITEEEVVPVIPVKVPEVPRKPVPEEKKPVPVPKKKEAPPAKVPEVPKKPEEKVPVLIPKKEKPPPAKVPEVPKKPVPEEKVPVPVPKKVEAPPAKVPEVPKKPVPEKKVPVPAPKKVEAPPAKVPEVPKKLIPEEKKPTPVPKKVEAPPPKVPKKREPVPVPVALPQEEEVLFEEEIVPEEEVLPEEEEVLPEEEEVLPEEEEVLPEEEEIPPEEEEVPPEEEYVPEEEEFVPEEEVLPEVKPKVPVPAPVPEVPKKPVPEKKVPVPAPKKVEPPPPPKVPEIKKKVTEKKVVIPKKEEAPPAKVSVVPKKPEPEKKVPPPGLKKAVAPPAKVPEVPKKVEEKRIILPKEEEVLPVEVTEEPEEEPISEEEIPEEPPSIEEVEEVAPPRVPEVIKKAVPEAPTPVPKKVEAPPAKVSKKIPEEKVPVPVQKKEAPPAKVPEVPKKVPEKKVLVPKKEAVPPAKGRTVLEEKVSVAFRQEVVVKERLELEVVEAEVEEIPEEEEFHEVEEYFEEGEFHEVEEFIKLEQHRVEEEHRVEKVHRVIEVFEAEEVEVFEKPKAPPKGPEISEKIIPPKKPPTKVVPRKEPPAKVPEVPKKIVVEEKVRVPEEPRVPPTKAPEVPKKIVPEEKVREAVLKKPEVPPAKVPGMPKKSVQEEKSPIVISEDTEMYIYEASEEAVLEEKVLVTQPQKTKPKLAKVPEPPKKVVPEDKIYVTIPKKRETPATKEPDTTRGIFPEVEPPEAIPEIPEHPPTEEFEVFKEVIPEGETPIVKRRKTPSPTVPESPREIVPVKETPMAAPLEIEIPPTKAPEAMKEVVPEMKIFEDVPEEPETPRMKTPEAPQEIIPAKTVPSKKREPPSVKVPEALQEIVPEKKTLVVPLRKPEVLPDEVPEALREVVPEKKVHPPQRAEVVPVKVHEAPKEIIPEKKVSVVPPKKPEVPPVKVPEASKEVIREEKVPLAPPKEPEVPPVKVPEPPKEVVPEKKAPVAPPKEPEVPPVKVPEAPKEVVPEKKVPVPPPKKPEVPPTKVPEVPKAAVPEKKLPEAIPPKPESPPPEVPEVLPPKEVVPEKKVPVPPAKKPEAPPPKVPEAPKEVVLEKKASVAVPKKPEAPRAKVPEAAQEVVPEKKIPKAPIKKPEAPAVTVPEVPQEATEKEIPVAPPKKPEAPIVPVPEAQEVVPEKKVPKAPPTKPEAPPATVPEVPQEIVPEKKTLVLPKKPEVPPVTVPEAPKEVVLEKKVPSAPPKKPEVPPVKVPEAPKEVVPEKKVPVPPPKKPEVPPTKVPEVPKAAVPEKKVPEAIPPKPESPPPEVPEVLPPKEVVPEKKVPVPPAKKPEAPPPKVPEAPKEVVLEKKASVAVPKKPEAPRAKVPEAAQEVVPEKKIPKAPIKKPEAPAVTVPEVPQEAAEKEIPVAPPKKPEAPIVPVPEAQEVVPEKKVPKAPPTKPEAPPATVPEVPQEIVPEKKTLVLPKKPEVPPVTVPEAPKEVVLEKKVPSTPPKKPEVPPVKVPEAPKEVVPEKKVPVPPPKKPEVPPTKVPEVPKAAVPEKKVPEAIPPKPESPPPEVPEVLPPKEVVPEKKVPVPPAKKPEAPPPKVPEAPKEVVLEKKVSVAVPKKPEAPRAKVPEAAQEVVPEKKIPKAPIKKPEAPAVTVPEVPQEAAEKEIPVAPPKKPEAPIVPVPEAQEVVPEKKVPKAPPTKPEAPPATVPEVPQEIVPEKKTLVLPKKPEVPPVTVPEAPKEVVLEKKVPLAPPKKPEVPPVKVPEAPKEVVPEKKVPVTPPKKPEVPPVKVPEAPIEVVPEKKMPLAPPKKPEVPPVKVPEAPKEVVPEKKVPSAPPKKPEVPPVKVPEAPKEVVPEKKVPAAPPKKPEVTPVKVPEAPKEVVPEKKVPVPPPKKPEVPPTKVPEVPKVAVPEKKVPEAIPPKPESPPPEVFEEPEEVALEEPPAEVVEEPEPAAPPQVTVPPKKPVPEKKAPAVVAKKPELPPVKVPEVPKEVVPEKKVPLVVPKKPEAPPAKVPEVPKEVVPEKKVAVPKKPEVPPAKVPEVPKKPVLEEKPAVPVPERAESPPPEVYEEPEEIAPEEEIAPEEEKPVPVAEEEEPEVPPPAVPEEPKKIIPEKKVPVIKKPEAPPPKEPEMPKKVVPVKKVPTVKKPETPAAKVPEVPKKLVPVKKEPVPVTKKPEVLPEKVPKVPEKIIPEKEVSVPIPAEPEVPPAEVEETPEEIIYEEKASITIGRKETPPVEEREIEKYIKPEEPEPEPQPEEIPVKEPEPEKVIEKPKLKPRPPPPPPAPPKEDVKEKIFQLKAIPKKKVPEKPQVPEKVELTPLKVPGGEKKVRKLLPERKPEPKEEVVLKSVLRKRPEEEEPKVEPKKLEKVKKPAVPEPPPPKPVEEVEVPTVTKRERKIPEPTKVPEIKPAIPLPAPEPKPKPEAEVKTIKPPPVEPEPTPIAAPVTVPVVGKKAEAKAPKEEAAKPKGPIKGVPKKTPSPIEAERRKLRPGSGGEKPPDEAPFTYQLKAVPLKFVKEIKDIILTESEFVGSSAIFECLVSPSTAITTWMKDGSNIRESPKHRFIADGKDRKLHIIDVQLSDAGEYTCVLRLGNKEKTSTAKLVVEELPVRFVKTLEEEVTVVKGQPLYLSCELNKERDVVWRKDGKIVVEKPGRIVPGVIGLMRALTINDADDTDAGTYTVTVENANNLECSSCVKVVEVIRDWLVKPIRDQHVKPKGTAIFACDIAKDTPNIKWFKGYDEIPAEPNDKTEILRDGNHLYLKIKNAMPEDIAEYAVEIEGKRYPAKLTLGEREVELLKPIEDVTIYEKESASFDAEISEADIPGQWKLKGELLRPSPTCEIKAEGGKRFLTLHKVKLDQAGEVLYQALNAITTAILTVKEIELDFAVPLKDVTVPERRQARFECVLTREANVIWSKGPDIIKSSDKFDIIADGKKHILVINDSQFDDEGVYTAEVEGKKTSARLFVTGIRLKFMSPLEDQTVKEGETATFVCELSHEKMHVVWFKNDAKLHTSRTVLISSEGKTHKLEMKEVTLDDISQIKAQVKELSSTAQLKVLEADPYFTVKLHDKTAVEKDEITLKCEVSKDVPVKWFKDGEEIVPSPKYSIKADGLRRILKIKKADLKDKGEYVCDCGTDKTKANVTVEARLIKVEKPLYGVEVFVGETAHFEIELSEPDVHGQWKLKGQPLTASPDCEIIEDGKKHILILHNCQLGMTGEVSFQAANAKSAANLKVKELPLIFITPLSDVKVFEKDEAKFECEVSREPKTFRWLKGTQEITGDDRFELIKDGTKHSMVIKSAAFEDEAKYMFEAEDKHTSGKLIIEGIRLKFLTPLKDVTAKEKESAVFTVELSHDNIRVKWFKNDQRLHTTRSVSMQDEGKTHSITFKDLSIDDTSQIRVEAMGMSSEAKLTVLEGDPYFTGKLQDYTGVEKDEVILQCEISKADAPVKWFKDGKEIKPSKNAVIKADGKKRMLILKKALKSDIGQYTCDCGTDKTSGKLDIEDREIKLVRPLHSVEVMETETARFETEISEDDIHANWKLKGEALLQTPDCEIKEEGKIHSLVLHNCRLDQTGGVDFQAANVKSSAHLRVKPRVIGLLRPLKDVTVTAGETATFDCELSYEDIPVEWYLKGKKLEPSDKVVPRSEGKVHTLTLRDVKLEDAGEVQLTAKDFKTHANLFVKEPPVEFTKPLEDQTVEEGATAVLECEVSRENAKVKWFKNGTEILKSKKYEIVADGRVRKLVIHDCTPEDIKTYTCDAKDFKTSCNLNVVPPHVEFLRPLTDLQVREKEMARFECELSRENAKVKWFKDGAEIKKGKKYDIISKGAVRILVINKCLLDDEAEYSCEVRTARTSGMLTVLEEEAVFTKNLANIEVSETDTIKLVCEVSKPGAEVIWYKGDEEIIETGRYEILTEGRKRILVIQNAHLEDAGNYNCRLPSSRTDGKVKVHELAAEFISKPQNLEILEGEKAEFVCSISKESFPVQWKRDDKTLESGDKYDVIADGKKRVLVVKDATLQDMGTYVVMVGAARAAAHLTVIEKLRIVVPLKDTRVKEQQEVVFNCEVNTEGAKAKWFRNEEAIFDSSKYIILQKDLVYTLRIRDAHLDDQANYNVSLTNHRGENVKSAANLIVEEEDLRIVEPLKDIETMEKKSVTFWCKVNRLNVTLKWTKNGEEVPFDNRVSYRVDKYKHMLTIKDCGFPDEGEYIVTAGQDKSVAELLIIEAPTEFVEHLEDQTVTEFDDAVFSCQLSREKANVKWYRNGREIKEGKKYKFEKDGSIHRLIIKDCRLDDECEYACGVEDRKSRARLFVEEIPVEIIRPPQDILEAPGADVVFLAELNKDKVEVQWLRNNMVVVQGDKHQMMSEGKIHRLQICDIKPRDQGEYRFIAKDKEARAKLELAAAPKIKTADQDLVVDVGKPLTMVVPYDAYPKAEAEWFKENEPLSTKTIDTTAEQTSFRILEAKKGDKGRYKIVLQNKHGKAEGFINLKVIDVPGPVRNLEVTETFDGEVSLAWEEPLTDGGSKIIGYVVERRDIKRKTWVLATDRAESCEFTVTGLQKGGVEYLFRVSARNRVGTGEPVETDNPVEARSKYDVPGPPLNVTITDVNRFGVSLTWEPPEYDGGAEITNYVIELRDKTSIRWDTAMTVRAEDLSATVTDVVEGQEYSFRVRAQNRIGVGKPSAATPFVKVADPIERPSPPVNLTSSDQTQSSVQLKWEPPLKDGGSPILGYIIERCEEGKDNWIRCNMKLVPELTYKVTGLEKGNKYLYRVSAENKAGVSDPSEILGPLTADDAFVEPTMDLSAFKDGLEVIVPNPITILVPSTGYPRPTATWCFGDKVLETGDRVKMKTLSAYAELVISPSERSDKGIYTLKLENRVKTISGEIDVNVIARPSAPKELKFGDITKDSVHLTWEPPDDDGGSPLTGYVVEKREVSRKTWTKVMDFVTDLEFTVPDLVQGKEYLFKVCARNKCGPGEPAYVDEPVNMSTPATVPDPPENVKWRDRTANSIFLTWDPPKNDGGSRIKGYIVERCPRGSDKWVACGEPVAETKMEVTGLEEGKWYAYRVKALNRQGASKPSRPTEEIQAVDTQEAPEIFLDVKLLAGLTVKAGTKIELPATVTGKPEPKITWTKADMILKQDKRITIENVPKKSTVTIVDSKRSDTGTYIIEAVNVCGRATAVVEVNVLDKPGPPAAFDITDVTNESCLLTWNPPRDDGGSKITNYVVERRATDSEVWHKLSSTVKDTNFKATKLIPNKEYIFRVAAENMYGVGEPVQASPITAKYQFDPPGPPTRLEPSDITKDAVTLTWCEPDDDGGSPITGYWVERLDPDTDKWVRCNKMPVKDTTYRVKGLTNKKKYRFRVLAENLAGPGKPSKSTEPILIKDPIDPPWPPGKPTVKDVGKTSVRLNWTKPEHDGGAKIESYVIEMLKTGTDEWVRVAEGVPTTQHLLPGLMEGQEYSFRVRAVNKAGESEPSEPSDPVLCREKLYPPSPPRWLEVINITKNTADLKWTVPEKDGGSPITNYIVEKRDVRRKGWQTVDTTVKDTKCTVTPLTEGSLYVFRVAAENAIGQSDYTEIEDSVLAKDTFTTPGPPYALAVVDVTKRHVDLKWEPPKNDGGRPIQRYVIEKKERLGTRWVKAGKTAGPDCNFRVTDVIEGTEVQFQVRAENEAGVGHPSEPTEILSIEDPTSPPSPPLDLHVTDAGRKHIAIAWKPPEKNGGSPIIGYHVEMCPVGTEKWMRVNSRPIKDLKFKVEEGVVPDKEYVLRVRAVNAIGVSEPSEISENVVAKDPDCKPTIDLETHDIIVIEGEKLSIPVPFRAVPVPTVSWHKDGKEVKASDRLTMKNDHISAHLEVPKSVRADAGIYTITLENKLGSATASINVKVIGLPGPCKDIKASDITKSSCKLTWEPPEFDGGTPILHYVLERREAGRRTYIPVMSGENKLSWTVKDLIPNGEYFFRVKAVNKVGGGEYIELKNPVIAQDPKQPPDPPVDVEVHNPTAEAMTITWKPPLYDGGSKIMGYIIEKIAKGEERWKRCNEHLVPILTYTAKGLEEGKEYQFRVRAENAAGISEPSRATPPTKAVDPIDAPKVILRTSLEVKRGDEIALDASISGSPYPTITWIKDENVIVPEEIKKRAAPLVRRRKGEVQEEEPFVLPLTQRLSIDNSKKGESQLRVRDSLRPDHGLYMIKVENDHGIAKAPCTVSVLDTPGPPINFVFEDIRKTSVLCKWEPPLDDGGSEIINYTLEKKDKTKPDSEWIVVTSTLRHCKYSVTKLIEGKEYLFRVRAENRFGPGPPCVSKPLVAKDPFGPPDAPDKPIVEDVTSNSMLVKWNEPKDNGSPILGYWLEKREVNSTHWSRVNKSLLNALKANVDGLLEGLTYVFRVCAENAAGPGKFSPPSDPKTAHDPISPPGPPIPRVTDTSSTTIELEWEPPAFNGGGEIVGYFVDKQLVGTNEWSRCTEKMIKVRQYTVKEIREGADYKLRVSAVNAAGEGPPGETQPVTVAEPQEPPAVELDVSVKGGIQIMAGKTLRIPAVVTGRPVPTKVWTKEEGELDKDRVVIDNVGTKSELIIKDALRKDHGRYVITATNSCGSKFAAARVEVFDVPGPVLDLKPVVTNRKMCLLNWSDPEDDGGSEITGFIIERKDAKMHTWRQPIETERSKCDITGLLEGQEYKFRVIAKNKFGCGPPVEIGPILAVDPLGPPTSPERLTYTERTKSTITLDWKEPRSNGGSPIQGYIIEKRRHDKPDFERVNKRLCPTTSFLVENLDEHQMYEFRVKAVNEIGESEPSLPLNVVIQDDEVPPTIKLRLSVRGDTIKVKAGEPVHIPADVTGLPMPKIEWSKNETVIEKPTDALQITKEEVSRSEAKTELSIPKAVREDKGTYTVTASNRLGSVFRNVHVEVYDRPSPPRNLAVTDIKAESCYLTWDAPLDNGGSEITHYVIDKRDASRKKAEWEEVTNTAVEKRYGIWKLIPNGQYEFRVRAVNKYGISDECKSDKVVIQDPYRLPGPPGKPKVLARTKGSMLVSWTPPLDNGGSPITGYWLEKREEGSPYWSRVSRAPITKVGLKGVEFNVPRLLEGVKYQFRAMAINAAGIGPPSEPSDPEVAGDPIFPPGPPSCPEVKDKTKSSISLGWKPPAKDGGSPIKGYIVEMQEEGTTDWKRVNEPDKLITTCECVVPNLKELRKYRFRVKAVNEAGESEPSDTTGEIPATDIQEEPEVFIDIGAQDCLVCKAGSQIRIPAVIKGRPTPKSSWEFDGKAKKAMKDGVHDIPEDAQLETAENSSVIIIPECKRSHTGKYSITAKNKAGQKTANCRVKVMDVPGPPKDLKVSDITRGSCRLSWKMPDDDGGDRIKGYVIEKRTIDGKAWTKVNPDCGSTTFVVPDLLSEQQYFFRVRAENRFGIGPPVETIQRTTARDPIYPPDPPIKLKIGLITKNTVHLSWKPPKNDGGSPVTHYIVECLAWDPTGTKKEAWRQCNKRDVEELQFTVEDLVEGGEYEFRVKAVNAAGVSKPSATVGPVTVKDQTCPPSIDLKEFMEVEEGTNVNIVAKIKGVPFPTLTWFKAPPKKPDNKEPVLYDTHVNKLVVDDTCTLVIPQSRRSDTGLYTITAVNNLGTASKEMRLNVLGRPGPPVGPIKFESVSADQMTLSWFPPKDDGGSKITNYVIEKREANRKTWVHVSSEPKECTYTIPKLLEGHEYVFRIMAQNKYGIGEPLDSEPETARNLFSVPGAPDKPTVSSVTRNSMTVNWEEPEYDGGSPVTGYWLEMKDTTSKRWKRVNRDPIKAMTLGVSYKVTGLIEGSDYQFRVYAINAAGVGPASLPSDPATARDPIAPPGPPFPKVTDWTKSSADLEWSPPLKDGGSKVTGYIVEYKEEGKEEWEKGKDKEVRGTKLVVTGLKEGAFYKFRVRAVNIAGIGEPGEVTDVIEMKDRLVSPDLQLDASVRDRIVVHAGGVIRIIAYVSGKPPPTVTWNMNERTLPQEATIETTAISSSMVIKNCQRSHQGVYSLLAKNEAGERKKTIIVDVLDVPGPVGTPFLAHNLTNESCKLTWFSPEDDGGSPITNYVIEKRESDRRAWTPVTYTVTRQNATVQGLIQGKAYFFRIAAENSIGMGPFVETSEALVIREPITVPERPEDLEVKEVTKNTVTLTWNPPKYDGGSEIINYVLESRLIGTEKFHKVTNDNLLSRKYTVKGLKEGDTYEYRVSAVNIVGQGKPSFCTKPITCKDELAPPTLHLDFRDKLTIRVGEAFALTGRYSGKPKPKVSWFKDEADVLEDDRTHIKTTPATLALEKIKAKRSDSGKYCVVVENSTGSRKGFCQVNVVDRPGPPVGPVSFDEVTKDYMVISWKPPLDDGGSKITNYIIEKKEVGKDVWMPVTSASAKTTCKVSKLLEGKDYIFRIHAENLYGISDPLVSDSMKAKDRFRVPDAPDQPIVTEVTKDSALVTWNKPHDGGKPITNYILEKRETMSKRWARVTKDPIHPYTKFRVPDLLEGCQYEFRVSAENEIGIGDPSPPSKPVFAKDPIAKPSPPVNPEAIDTTCNSVDLTWQPPRHDGGSKILGYIVEYQKVGDEEWRRANHTPESCPETKYKVTGLRDGQTYKFRVLAVNAAGESDPAHVPEPVLVKDRLEPPELILDANMAREQHIKVGDTLRLSAIIKGVPFPKVTWKKEDRDAPTKARIDVTPVGSKLEIRNAAHEDGGIYSLTVENPAGSKTVSVKVLVLDKPGPPRDLEVSEIRKDSCYLTWKEPLDDGGSVITNYVVERRDVASAQWSPLSATSKKKSHFAKHLNEGNQYLFRVAAENQYGRGPFVETPKPIKALDPLHPPGPPKDLHHVDVDKTEVSLVWNKPDRDGGSPITGYLVEYQEEGTQDWIKFKTVTNLECVVTGLQQGKTYRFRVKAENIVGLGLPDTTIPIECQEKLVPPSVELDVKLIEGLVVKAGTTVRFPAIIRGVPVPTAKWTTDGSEIKTDEHYTVETDNFSSVLTIKNCLRRDTGEYQITVSNAAGSKTVAVHLTVLDVPGPPTGPINILDVTPEHMTISWQPPKDDGGSPVINYIVEKQDTRKDTWGVVSSGSSKTKLKIPHLQKGCEYVFRVRAENKIGVGPPLDSTPTVAKHKFSPPSPPGKPVVTDITENAATVSWTLPKSDGGSPITGYYMERREVTGKWVRVNKTPIADLKFRVTGLYEGNTYEFRVFAENLAGLSKPSPSSDPIKACRPIKPPGPPINPKLKDKSRETADLVWTKPLSDGGSPILGYVVECQKPGTAQWNRINKDELIRQCAFRVPGLIEGNEYRFRIKAANIVGEGEPRELAESVIAKDILHPPEVELDVTCRDVITVRVGQTIRILARVKGRPEPDITWTKEGKVLVREKRVDLIQDLPRVELQIKEAVRADHGKYIISAKNSSGHAQGSAIVNVLDRPGPCQNLKVTNVTKENCTISWENPLDNGGSEITNFIVEYRKPNQKGWSIVASDVTKRLIKANLLANNEYYFRVCAENKVGVGPTIETKTPILAINPIDRPGEPENLHIADKGKTFVYLKWRRPDYDGGSPNLSYHVERRLKGSDDWERVHKGSIKETHYMVDRCVENQIYEFRVQTKNEGGESDWVKTEEVVVKEDLQKPVLDLKLSGVLTVKAGDTIRLEAGVRGKPFPEVAWTKDKDATDLTRSPRVKIDTRADSSKFSLTKAKRSDGGKYVVTATNTAGSFVAYATVNVLDKPGPVRNLKIVDVSSDRCTVCWDPPEDDGGCEIQNYILEKCETKRMVWSTYSATVLTPGTTVTRLIEGNEYIFRVRAENKIGTGPPTESKPVIAKTKYDKPGRPDPPEVTKVSKEEMTVVWNPPEYDGGKSITGYFLEKKEKHSTRWVPVNKSAIPERRMKVQNLLPDHEYQFRVKAENEIGIGEPSLPSRPVVAKDPIEPPGPPTNFRVVDTTKHSITLGWGKPVYDGGAPIIGYVVEMRPKIADASPDEGWKRCNAAAQLVRKEFTVTSLDENQEYEFRVCAQNQVGIGRPAELKEAIKPKEILEPPEIDLDASMRKLVIVRAGCPIRLFAIVRGRPAPKVTWRKVGIDNVVRKGQVDLVDTMAFLVIPNSTRDDSGKYSLTLVNPAGEKAVFVNVRVLDTPGPVSDLKVSDVTKTSCHVSWAPPENDGGSQVTHYIVEKREADRKTWSTVTPEVKKTSFHVTNLVPGNEYYFRVTAVNEYGPGVPTDVPKPVLASDPLSEPDPPRKLEVTEMTKNSATLAWLPPLRDGGAKIDGYITSYREEEQPADRWTEYSVVKDLSLVVTGLKEGKKYKFRVAARNAVGVSLPREAEGVYEAKEQLLPPKILMPEQITIKAGKKLRIEAHVYGKPHPTCKWKKGEDEVVTSSHLAVHKADSSSILIIKDVTRKDSGYYSLTAENSSGTDTQKIKVVVMDAPGPPQPPFDISDIDADACSLSWHIPLEDGGSNITNYIVEKCDVSRGDWVTALASVTKTSCRVGKLIPGQEYIFRVRAENRFGISEPLTSPKMVAQFPFGVPSEPKNARVTKVNKDCIFVAWDRPDSDGGSPIIGYLIERKERNSLLWVKANDTLVRSTEYPCAGLVEGLEYSFRIYALNKAGSSPPSKPTEYVTARMPVDPPGKPEVIDVTKSTVSLIWARPKHDGGSKIIGYFVEACKLPGDKWVRCNTAPHQIPQEEYTATGLEEKAQYQFRAIARTAVNISPPSEPSDPVTILAENVPPRIDLSVAMKSLLTVKAGTNVCLDATVFGKPMPTVSWKKDGTLLKPAEGIKMAMQRNLCTLELFSVNRKDSGDYTITAENSSGSKSATIKLKVLDKPGPPASVKINKMYSDRAMLSWEPPLEDGGSEITNYIVDKRETSRPNWAQVSATVPITSCSVEKLIEGHEYQFRICAENKYGVGDPVFTEPAIAKNPYDPPGRCDPPVISNITKDHMTVSWKPPADDGGSPITGYLLEKRETQAVNWTKVNRKPIIERTLKATGLQEGTEYEFRVTAINKAGPGKPSDASKAAYARDPQYPPGPPAFPKVYDTTRSSVSLSWGKPAYDGGSPIIGYLVEVKRADSDNWVRCNLPQNLQKTRFEVTGLMEDTQYQFRVYAVNKIGYSDPSDVPDKHYPKDILIPPEGELDADLRKTLILRAGVTMRLYVPVKGRPPPKITWSKPNVNLRDRIGLDIKSTDFDTFLRCENVNKYDAGKYILTLENSCGKKEYTIVVKVLDTPGPPVNVTVKEISKDSAYVTWEPPIIDGGSPIINYVVQKRDAERKSWSTVTTECSKTSFRVANLEEGKSYFFRVFAENEYGIGDPGETRDAVKASQTPGPVVDLKVRSVSKSSCSIGWKKPHSDGGSRIIGYVVDFLTEENKWQRVMKSLSLQYSAKDLTEGKEYTFRVSAENENGEGTPSEITVVARDDVVAPDLDLKGLPDLCYLAKENSNFRLKIPIKGKPAPSVSWKKGEDPLATDTRVSVESSAVNTTLIVYDCQKSDAGKYTITLKNVAGTKEGTISIKVVGKPGIPTGPIKFDEVTAEAMTLKWAPPKDDGGSEITNYILEKRDSVNNKWVTCASAVQKTTFRVTRLHEGMEYTFRVSAENKYGVGEGLKSEPIVARHPFDVPDAPPPPNIVDVRHDSVSLTWTDPKKTGGSPITGYHLEFKERNSLLWKRANKTPIRMRDFKVTGLTEGLEYEFRVMAINLAGVGKPSLPSEPVVALDPIDPPGKPEVINITRNSVTLIWTEPKYDGGHKLTGYIVEKRDLPSKSWMKANHVNVPECAFTVTDLVEGGKYEFRIRAKNTAGAISAPSESTETIICKDEYEAPTIVLDPTIKDGLTIKAGDTIVLNAISILGKPLPKSSWSKAGKDIRPSDITQITSTPTSSMLTIKYATRKDAGEYTITATNPFGTKVEHVKVTVLDVPGPPGPVEISNVSAEKATLTWTPPLEDGGSPIKSYILEKRETSRLLWTVVSEDIQSCRHVATKLIQGNEYIFRVSAVNHYGKGEPVQSEPVKMVDRFGPPGPPEKPEVSNVTKNTATVSWKRPVDDGGSEITGYHVERREKKSLRWVRAIKTPVSDLRCKVTGLQEGSTYEFRVSAENRAGIGPPSEASDSVLMKDAAYPPGPPSNPHVTDTTKKSASLAWGKPHYDGGLEITGYVVEHQKVGDEAWIKDTTGTALRITQFVVPDLQTKEKYNFRISAINDAGVGEPAVIPDVEIVEREMAPDFELDAELRRTLVVRAGLSIRIFVPIKGRPAPEVTWTKDNINLKNRANIENTESFTLLIIPECNRYDTGKFVMTIENPAGKKSGFVNVRVLDTPGPVLNLRPTDITKDSVTLHWDLPLIDGGSRITNYIVEKREATRKSYSTATTKCHKCTYKVTGLSEGCEYFFRVMAENEYGIGEPTETTEPVKASEAPSPPDSLNIMDITKSTVSLAWPKPKHDGGSKITGYVIEAQRKGSDQWTHITTVKGLECVVRNLTEGEEYTFQVMAVNSAGRSAPRESRPVIVKEQTMLPELDLRGIYQKLVIAKAGDNIKVEIPVLGRPKPTVTWKKGDQILKQTQRVNFETTATSTILNINECVRSDSGPYPLTARNIVGEVGDVITIQVHDIPGPPTGPIKFDEVSSDFVTFSWDPPENDGGVPISNYVVEMRQTDSTTWVELATTVIRTTYKATRLTTGLEYQFRVKAQNRYGVGPGITSACIVANYPFKVPGPPGTPQVTAVTKDSMTISWHEPLSDGGSPILGYHVERKERNGILWQTVSKALVPGNIFKSSGLTDGIAYEFRVIAENMAGKSKPSKPSEPMLALDPIDPPGKPVPLNITRHTVTLKWAKPEYTGGFKITSYIVEKRDLPNGRWLKANFSNILENEFTVSGLTEDAAYEFRVIAKNAAGAISPPSEPSDAITCRDDVEAPKIKVDVKFKDTVILKAGEAFRLEADVSGRPPPTMEWSKDGKELEGTAKLEIKIADFSTNLVNKDSTRRDSGAYTLTATNPGGFAKHIFNVKVLDRPGPPEGPLAVTEVTSEKCVLSWFPPLDDGGAKIDHYIVQKRETSRLAWTNVASEVQVTKLKVTKLLKGNEYIFRVMAVNKYGVGEPLESEPVLAVNPYGPPDPPKNPEVTTITKDSMVVCWGHPDSDGGSEIINYIVERRDKAGQRWIKCNKKTLTDLRYKVSGLTEGHEYEFRIMAENAAGISAPSPTSPFYKACDTVFKPGPPGNPRVLDTSRSSISIAWNKPIYDGGSEITGYMVEIALPEEDEWQIVTPPAGLKATSYTITGLTENQEYKIRIYAMNSEGLGEPALVPGTPKAEDRMLPPEIELDADLRKVVTIRACCTLRLFVPIKGRPAPEVKWARDHGESLDKASIESTSSYTLLIVGNVNRFDSGKYILTVENSSGSKSAFVNVRVLDTPGPPQDLKVKEVTKTSVTLTWDPPLLDGGSKIKNYIVEKRESTRKAYSTVATNCHKTSWKVDQLQEGCSYYFRVLAENEYGIGLPAETAESVKASERPLPPGKITLMDVTRNSVSLSWEKPEHDGGSRILGYIVEMQTKGSDKWATCATVKVTEATITGLIQGEEYSFRVSAQNEKGISDPRQLSVPVIAKDLVIPPAFKLLFNTFTVLAGEDLKVDVPFIGRPTPAVTWHKDNVPLKQTTRVNAESTENNSLLTIKDACREDVGHYVVKLTNSAGEAIETLNVIVLDKPGPPTGPVKMDEVTADSITLSWGPPKYDGGSSINNYIVEKRDTSTTTWQIVSATVARTTIKACRLKTGCEYQFRIAAENRYGKSTYLNSEPTVAQYPFKVPGPPGTPVVTLSSRDSMEVQWNEPISDGGSRVIGYHLERKERNSILWVKLNKTPIPQTKFKTTGLEEGVEYEFRVSAENIVGIGKPSKVSECYVARDPCDPPGRPEAIIVTRNSVTLQWKKPTYDGGSKITGYIVEKKELPEGRWMKASFTNIIDTHFEVTGLVEDHRYEFRVIARNAAGVFSEPSESTGAITARDEVDPPRISMDPKYKDTIVVHAGESFKVDADIYGKPIPTIQWIKGDQELSNTARLEIKSTDFATSLSVKDAVRVDSGNYILKAKNVAGERSVTVNVKVLDRPGPPEGPVVISGVTAEKCTLAWKPPLQDGGSDIINYIVERRETSRLVWTVVDANVQTLSCKVTKLLEGNEYTFRIMAVNKYGVGEPLESEPVVAKNPFVVPDAPKAPEVTTVTKDSMIVVWERPASDGGSEILGYVLEKRDKEGIRWTRCHKRLIGELRLRVTGLIENHDYEFRVSAENAAGLSEPSPPSAYQKACDPIYKPGPPNNPKVIDITRSSVFLSWSKPIYDGGCEIQGYIVEKCDVSVGEWTMCTPPTGINKTNIEVEKLLEKHEYNFRICAINKAGVGEHADVPGPIIVEEKLEAPDIDLDLELRKIINIRAGGSLRLFVPIKGRPTPEVKWGKVDGEIRDAAIIDVTSSFTSLVLDNVNRYDSGKYTLTLENSSGTKSAFVTVRVLDTPSPPVNLKVTEITKDSVSITWEPPLLDGGSKIKNYIVEKREATRKSYAAVVTNCHKNSWKIDQLQEGCSYYFRVTAENEYGIGLPAQTADPIKVAEVPQPPGKITVDDVTRNSVSLSWTKPEHDGGSKIIQYIVEMQAKHSEKWSECARVKSLQAVITNLTQGEEYLFRVVAVNEKGRSDPRSLAVPIVAKDLVIEPDVKPAFSSYSVQVGQDLKIEVPISGRPKPTITWTKDGLPLKQTTRINVTDSLDLTTLSIKETHKDDGGQYGITVANVVGQKTASIEIVTLDKPDPPKGPVKFDDVSAESITLSWNPPLYTGGCQITNYIVQKRDTTTTVWDVVSATVARTTLKVTKLKTGTEYQFRIFAENRYGQSFALESDPIVAQYPYKEPGPPGTPFATAISKDSMVIQWHEPVNNGGSPVIGYHLERKERNSILWTKVNKTIIHDTQFKAQNLEEGIEYEFRVYAENIVGVGKASKNSECYVARDPCDPPGTPEPIMVKRNEITLQWTKPVYDGGSMITGYIVEKRDLPDGRWMKASFTNVIETQFTVSGLTEDQRYEFRVIAKNAAGAISKPSDSTGPITAKDEVELPRISMDPKFRDTIVVNAGETFRLEADVHGKPLPTIEWLRGDKEIEESARCEIKNTDFKALLIVKDAIRIDGGQYILRASNVAGSKSFPVNVKVLDRPGPPEGPVQVTGVTSEKCSLTWSPPLQDGGSDISHYVVEKRETSRLAWTVVASEVVTNSLKVTKLLEGNEYVFRIMAVNKYGVGEPLESAPVLMKNPFVLPGPPKSLEVTNIAKDSMTVCWNRPDSDGGSEIIGYIVEKRDRSGIRWIKCNKRRITDLRLRVTGLTEDHEYEFRVSAENAAGVGEPSPATVYYKACDPVFKPGPPTNAHIVDTTKNSITLAWGKPIYDGGSEILGYVVEICKADEEEWQIVTPQTGLRVTRFEISKLTEHQEYKIRVCALNKVGLGEATSVPGTVKPEDKLEAPELDLDSELRKGIVVRAGGSARIHIPFKGRPTPEITWSREEGEFTDKVQIEKGVNYTQLSIDNCDRNDAGKYILKLENSSGSKSAFVTVKVLDTPGPPQNLAVKEVRKDSAFLVWEPPIIDGGAKVKNYVIDKRESTRKAYANVSSKCSKTSFKVENLTEGAIYYFRVMAENEFGVGVPVETVDAVKAAEPPSPPGKVTLTDVSQTSASLMWEKPEHDGGSRVLGYVVEMQPKGTEKWSIVAESKVCNAVVTGLSSGQEYQFRVKAYNEKGKSDPRVLGVPVIAKDLTIQPSLKLPFNTYSIQAGEDLKIEIPVIGRPRPNISWVKDGEPLKQTTRVNVEETATSTVLHIKEGNKDDFGKYTVTATNSAGTATENLSVIVLEKPGPPVGPVRFDEVSADFVVISWEPPAYTGGCQISNYIVEKRDTTTTTWHMVSATVARTTIKITKLKTGTEYQFRIFAENRYGKSAPLDSKAVIVQYPFKEPGPPGTPFVTSISKDQMLVQWHEPVNDGGTKIIGYHLEQKEKNSILWVKLNKTPIQDTKFKTTGLDEGLEYEFKVSAENIVGIGKPSKVSECFVARDPCDPPGRPEAIVITRNNVTLKWKKPAYDGGSKITGYIVEKKDLPDGRWMKASFTNVLETEFTVSGLVEDQRYEFRVIARNAAGNFSEPSDSSGAITARDEIDAPNASLDPKYKDVIVVHAGETFVLEADIRGKPIPDVVWSKDGKELEETAARMEIKSTIQKTTLVVKDCIRTDGGQYILKLSNVGGTKSIPITVKVLDRPGPPEGPLKVTGVTAEKCYLAWNPPLQDGGANISHYIIEKRETSRLSWTQVSTEVQALNYKVTKLLPGNEYIFRVMAVNKYGIGEPLESGPVTACNPYKPPGPPSTPEVSAITKDSMVVTWARPVDDGGTEIEGYILEKRDKEGVRWTKCNKKTLTDLRLRVTGLTEGHSYEFRVAAENAAGVGEPSEPSVFYRACDALYPPGPPSNPKVTDTSRSSVSLAWSKPIYDGGAPVKGYVVEVKEAAADEWTTCTPPTGLQGKQFTVTKLKENTEYNFRICAINSEGVGEPATLPGSVVAQERIEPPEIELDADLRKVVVLRASATLRLFVTIKGRPEPEVKWEKAEGILTDRAQIEVTSSFTMLVIDNVTRFDSGRYNLTLENNSGSKTAFVNVRVLDSPSAPVNLTIREVKKDSVTLSWEPPLIDGGAKITNYIVEKRETTRKAYATITNNCTKTTFRIENLQEGCSYYFRVLASNEYGIGLPAETTEPVKVSEPPLPPGRVTLVDVTRNTATIKWEKPESDGGSKITGYVVEMQTKGSEKWSTCTQVKTLEATISGLTAGEEYVFRVAAVNEKGRSDPRQLGVPVIARDIEIKPSVELPFHTFNVKAREQLKIDVPFKGRPQATVNWRKDGQTLKETTRVNVSSSKTVTSLSIKEASKEDVGTYELCVSNSAGSITVPITIIVLDRPGPPGPIRIDEVSCDSITISWNPPEYDGGCQISNYIVEKKETTSTTWHIVSQAVARTSIKIVRLTTGSEYQFRVCAENRYGKSSYSESSAVVAEYPFSPPGPPGTPKVVHATKSTMLVTWQVPVNDGGSRVIGYHLEYKERSSILWSKANKILIADTQMKVSGLDEGLMYEYRVYAENIAGIGKCSKSCEPVPARDPCDPPGQPEVTNITRKSVSLKWSKPHYDGGAKITGYIVERRELPDGRWLKCNYTNIQETYFEVTELTEDQRYEFRVFARNAADSVSEPSESTGPIIVKDDVEPPRVMMDVKFRDVIVVKAGEVLKINADIAGRPLPVISWAKDGIEIEERARTEIISTDNHTLLTVKDCIRRDTGQYVLTLKNVAGTRSVAVNCKVLDKPGPPAGPLEINGLTAEKCSLSWGRPQEDGGADIDYYIVEKRETSHLAWTICEGELQMTSCKVTKLLKGNEYIFRVTGVNKYGVGEPLESVAIKALDPFTVPSPPTSLEITSVTKESMTLCWSRPESDGGSEISGYIIERREKNSLRWVRVNKKPVYDLRVKSTGLREGCEYEYRVYAENAAGLSLPSETSPLIRAEDPVFLPSPPSKPKIVDSGKTTITIAWVKPLFDGGAPITGYTVEYKKSDDTDWKTSIQSLRGTEYTISGLTTGAEYVFRVKSVNKVGASDPSDSSDPQIAKEREEEPLFDIDSEMRKTLIVKAGASFTMTVPFRGRPVPNVLWSKPDTDLRTRAYVDTTDSRTSLTIENANRNDSGKYTLTIQNVLSAASLTLVVKVLDTPGPPTNITVQDVTKESAVLSWDVPENDGGAPVKNYHIEKREASKKAWVSVTNNCNRLSYKVTNLQEGAIYYFRVSGENEFGVGIPAETKEGVKITEKPSPPEKLGVTSISKDSVSLTWLKPEHDGGSRIVHYVVEALEKGQKNWVKCAVAKSTHHVVSGLRENSEYFFRVFAENQAGLSDPRELLLPVLIKEQLEPPEIDMKNFPSHTVYVRAGSNLKVDIPISGKPLPKVTLSRDGVPLKATMRFNTEITAENLTINLKESVTADAGRYEITAANSSGTTKAFINIVVLDRPGPPTGPVVISDITEESVTLKWEPPKYDGGSQVTNYILLKRETSTAVWTEVSATVARTMMKVMKLTTGEEYQFRIKAENRFGISDHIDSACVTVKLPYTTPGPPSTPWVTNVTRESITVGWHEPVSNGGSAVVGYHLEMKDRNSILWQKANKLVIRTTHFKVTTISAGLIYEFRVYAENAAGVGKPSHPSEPVLAIDACEPPRNVRITDISKNSVSLSWQQPAFDGGSKITGYIVERRDLPDGRWTKASFTNVTETQFIISGLTQNSQYEFRVFARNAVGSISNPSEVVGPITCIDSYGGPVIDLPLEYTEVVKYRAGTSVKLRAGISGKPAPTIEWYKDDKELQTNALVCVENTTDLASILIKDADRLNSGCYELKLRNAMGSASATIRVQILDKPGPPGGPIEFKTVTAEKITLLWRPPADDGGAKITHYIVEKRETSRVVWSMVSEHLEECIITTTKIIKGNEYIFRVRAVNKYGIGEPLESDSVVAKNAFVTPGPPGIPEVTKITKNSMTVVWSRPIADGGSDISGYFLEKRDKKSLGWFKVLKETIRDTRQKVTGLTENSDYQYRVCAVNAAGQGPFSEPSEFYKAADPIDPPGPPAKIRIADSTKSSITLGWSKPVYDGGSAVTGYVVEIRQGEEEEWTTVSTKGEVRTTEYVVSNLKPGVNYYFRVSAVNCAGQGEPIEMNEPVQAKDILEAPEIDLDVALRTSVIAKAGEDVQVLIPFKGRPPPTVTWRKDEKNLGSDARYSIENTDSSSLLTIPQVTRNDTGKYILTIENGVGEPKSSTVSVKVLDTPAACQKLQVKHVSRGTVTLLWDPPLIDGGSPIINYVIEKRDATKRTWSVVSHKCSSTSFKLIDLSEKTPFFFRVLAENEIGIGEPCETTEPVKAAEVPAPIRDLSMKDSTKTSVILSWTKPDFDGGSVITEYVVERKGKGEQTWSHAGISKTCEIEVSQLKEQSVLEFRVFAKNEKGLSDPVTIGPITVKELIITPEVDLSDIPGAQVTVRIGHNVHLELPYKGKPKPSISWLKDGLPLKESEFVRFSKTENKITLSIKNAKKEHGGKYTVILDNAVCRIAVPITVITLGPPSKPKGPIRFDEIKADSVILSWDVPEDNGGGEITCYSIEKRETSQTNWKMVCSSVARTTFKVPNLVKDAEYQFRVRAENRYGVSQPLVSSIIVAKHQFRIPGPPGKPVIYNVTSDGMSLTWDAPVYDGGSEVTGFHVEKKERNSILWQKVNTSPISGREYRATGLVEGLDYQFRVYAENSAGLSSPSDPSKFTLAVSPVDPPGTPDYIDVTRETITLKWNPPLRDGGSKIVGYSIEKRQGNERWVRCNFTDVSECQYTVTGLSPGDRYEFRIIARNAVGTISPPSQSSGIIMTRDENVPPIVEFGPEYFDGLIIKSGESLRIKALVQGRPVPRVTWFKDGVEIEKRMNMEITDVLGSTSLFVRDATRDHRGVYTVEAKNASGSAKAEIKVKVQDTPGKVVGPIRFTNITGEKMTLWWDAPLNDGCAPITHYIIEKRETSRLAWALIEDKCEAQSYTAIKLINGNEYQFRVSAVNKFGVGRPLDSDPVVAQIQYTVPDAPGIPEPSNITGNSITLTWARPESDGGSEIQQYILERREKKSTRWVKVISKRPISETRFKVTGLTEGNEYEFHVMAENAAGVGPASGISRLIKCREPVNPPGPPTVVKVTDTSKTTVSLEWSKPVFDGGMEIIGYIIEMCKADLGDWHKVNAEACVKTRYTVTDLQAGEEYKFRVSAINGAGKGDSCEVTGTIKAVDRLTAPELDIDANFKQTHVVRAGASIRLFIAYQGRPTPTAVWSKPDSNLSLRADIHTTDSFSTLTVENCNRNDAGKYTLTVENNSGSKSITFTVKVLDTPGPPGPITFKDVTRGSATLMWDAPLLDGGARIHHYVVEKREASRRSWQVISEKCTRQIFKVNDLAEGVPYYFRVSAVNEYGVGEPYEMPEPIVATEQPAPPRRLDVVDTSKSSAVLAWLKPDHDGGSRITGYLLEMRQKGSDFWVEAGHTKQLTFTVERLVEKTEYEFRVKAKNDAGYSEPREAFSSVIIKEPQIEPTADLTGITNQLITCKAGSPFTIDVPISGRPAPKVTWKLEEMRLKETDRVSITTTKDRTTLTVKDSMRGDSGRYFLTLENTAGVKTFSVTVVVIGRPGPVTGPIEVSSVSAESCVLSWGEPKDGGGTEITNYIVEKRESGTTAWQLVNSSVKRTQIKVTHLTKYMEYSFRVSSENRFGVSKPLESAPIIAEHPFVPPSAPTRPEVYHVSANAMSIRWEEPYHDGGSKIIGYWVEKKERNTILWVKENKVPCLECNYKVTGLVEGLEYQFRTYALNAAGVSKASEASRPIMAQNPVDAPGRPEVTDVTRSTVSLIWSAPAYDGGSKVVGYIIERKPVSEVGDGRWLKCNYTIVSDNFFTVTALSEGDTYEFRVLAKNAAGVISKGSESTGPVTCRDEYAPPKAELDARLHGDLVTIRAGSDLVLDAAVGGKPEPKIIWTKGDKELDLCEKVSLQYTGKRATAVIKFCDRSDSGKYTLTVKNASGTKAVSVMVKVLDSPGPCGKLTVSRVTQEKCTLAWSLPQEDGGAEITHYIVERRETSRLNWVIVEGECPTLSYVVTRLIKNNEYIFRVRAVNKYGPGVPVESEPIVARNSFTIPSPPGIPEEVGTGKEHIIIQWTKPESDGGNEISNYLVDKREKKSLRWTRVNKDYVVYDTRLKVTSLMEGCDYQFRVTAVNAAGNSEPSEASNFISCREPSYTPGPPSAPRVVDTTKHSISLAWTKPMYDGGTDIVGYVLEMQEKDTDQWYRVHTNATIRNTEFTVPDLKMGQKYSFRVAAVNVKGMSEYSESIAEIEPVERIEIPDLELADDLKKTVTIRAGASLRLMVSVSGRPPPVITWSKQGIDLASRAIIDTTESYSLLIVDKVNRYDAGKYTIEAENQSGKKSATVLVKVYDTPGPCPSVKVKEVSRDSVTITWEIPTIDGGAPVNNYIVEKREAAMRAFKTVTTKCSKTLYRISGLVEGTMYYFRVLPENIYGIGEPCETSDAVLVSEVPLVPAKLEVVDVTKSTVTLAWEKPLYDGGSRLTGYVLEACKAGTERWMKVVTLKPTVLEHTVTSLNEGEQYLFRIRAQNEKGVSEPRETVTAVTVQDLRVLPTIDLSTMPQKTIHVPAGRPVELVIPIAGRPPPAASWFFAGSKLRESERVTVETHTKVAKLTIRETTIRDTGEYTLELKNVTGTTSETIKVIILDKPGPPTGPIKIDEIDATSITISWEPPELDGGAPLSGYVVEQRDAHRPGWLPVSESVTRSTFKFTRLTEGNEYVFRVAATNRFGIGSYLQSEVIECRSSIRIPGPPETLQIFDVSRDGMTLTWYPPEDDGGSQVTGYIVERKEVRADRWVRVNKVPVTMTRYRSTGLTEGLEYEHRVTAINARGSGKPSRPSKPIVAMDPIAPPGKPQNPRVTDTTRTSVSLAWSVPEDEGGSKVTGYLIEMQKVDQHEWTKCNTTPTKIREYTLTHLPQGAEYRFRVLACNAGGPGEPAEVPGTVKVTEMLEYPDYELDERYQEGIFVRQGGVIRLTIPIKGKPFPICKWTKEGQDISKRAMIATSETHTE

SEQ ID NO: 3495 - skipped

SEQ ID NO: 3496 - protein, 703 aa, Homo sapiens
MTGLEDQEFDFEFLFEFNQRDEGAAAAAPEHYGYASSNVSPALPLPTAHSTLPAPCHNLQTSTPGIIPPADHPSGYGAALDGGPAGYFLSSGHTRPDGAPALESPRIEITSCLGLYHNNNQFFHDVEVEDVLPSSKRSPSTATLSLPSLEAYRDPSCLSPASSLSSRSCNSEASSYESNYSYPYASPQTSPWQSPCVSPKTTDPEEGFPRGLGACTLLGSPRHSPSTSPRASVTEESWLGARSSRPASPCNKRKYSLNGRQPPYSPHHSPTPSPHGSPRVSVTDDSWLGNTTQYTSSAIVAAINALTTDSSLDLGDGVPVKSRKTTLEQPPSVALKVEPVGEDLGSPPPPADFAPEDYSSFQHIRKGGFCDQYLAVPQHPYQWAKPKPLSPTSYMSPTLPALDWQLPSHSGPYELRIEVQPKSHHRAHYETEGSRGAVKASAGGHPIVQLHGYLENEPLMLQLFIGTADDRLLRPHAFYQVHRITGKTVSTTSHEAILSNTKVLEIPLLPENSMRAVIDCAGILKLRNSDIELRKGETDIGRKNTRVRLVFRVHVPQPSGRTLSLQVASNPIECSQRSAQELPLVEKQSTDSYPVVGGKKMVLSGHNFLQDSKVIFVEKAPDGHHVWEMEAKTDRDLCKPNSLVVEIPPFRNQRITSPVHVSFYVCNGKRKRSQYQRFTYLPANGNAIFLTVSREHERVGCFF

SEQ ID NO: 3497 - protein, 701 aa, Homo sapiens
PASLEWILSLLSPFAFMLGMAQLLHLDYDLNSNAFPHPSDGSNLIVATNFMLAFDTCLYLALAIYFEKILPNEYGHRRPPLFFLKSSFWSQTQKTDHVALEDEMDADPSFHDSFEQAPPEFQGKEAIRIRNVTKEYKGKPDKIEALKDLVFDIYEGQITAILGHSGAGKSTLLNILSGLSVPTKGSVTIYNNKLSEMADLENLSKLTGVCPQSNVQFDFLTVRENLRLFAKIKGILPQEVDKEIQRVLLELEMKNIQDVLAQNLSGGQKRKLTFGIAILGDPQIFLLDEPTAGLDPFSRHQVWNLLKERKTDRVILFSTQFMDEADILADRKVFLSQGKLKCAGSSLFLKKKWGIGYHLSLQLNEICVEENITSLVKQHIPDAKLSAKSEGKLIYTLPLERTNKFPELYKDLDSYPDLGIENYGVSMTTLNEVFLKLEGKSTINESDIAILGEVQAEKADDTERLVEMEQVLSSLNKMRKTIGGVALWRQQICAIARVRLLKLKHERKALLALLLILMAGFCPLLVEYTMVKIYQNSYTWELSPHLYFLAPGQQPHDPLTQLLIINKTGASIDDFIQSVEHQNIALEVDAFGTRNGTDDPSYNGAITVCCNEKNYSFSLACNAKRLNCFPVLMDIVSNGLLGMVKPSVHIRTERSTFLEVNIYNLTIPDSPLSGISQITLLSAGILFLLSKPLHNKLTFGL

SEQ ID NO: 3498 - protein, 635 aa, Homo sapiens
MAMRPRSHPPVGAGTGGGPACVPVAEASTGAWTAEGAAGTRCRASRAPCRPPPVPAPSQLPASSPTKCEICVKNTAILAITLITPQDPHLDPVPRGQPTFTKKKKTIRLFWNEVRPFDWPCKNNRRCREFLWSKLEPIKVDTSRLEHLFESKSKELSVSKKTAADGKRQEIIVLDSKRSNAINIGLTVLPPPRTIKIAILNFDEYALNKEGIEKILTMIPTDEEKQKIQEAQLANPEIPLGSAEQFLLTLSSISELSARLHLWAFKMDYETTEKEVAEPLLDLKEGIDQLENNKTLGFILSTLLAIGNFLNGTNAKAFELSYLEKVPEVKDTVHKQSLLHHVCTMVVENFPDSSDLYSEIGAITRSAKVDFDQLQDNLCQMERRCKASWDHLKAIAKHEMKPVLKQRMSEFLKDCAERIIILKIVHRRIINRFHSFLLFMGHPPYAIREVNINKFCRIISEFALEYRTTRERVLQQKQKRANHRERNKTRGKMITDSGKFSGSSPAPPSQPQGLSYAEDAAEHENMKAVLKTSSPSVEDATPALGVRTRSRASRGSTSSWTMGTDDSPNVTDDAADEIMDRIVKSATQVPSQRVVPRERKRSRANRKSLRRTLKSGLTPEEARALGLVGTSELQL

SEQ ID NO: 3499 - protein, 87 aa, Homo sapiens
FVRLLELFPSGNKPGPCWPGPSSHANGDPVAVAKAQPSRLIMGTHRDLEAFKRLNYRKTKLGGKAPLPYPSKGPGNIPRGDPPWREL

SEQ ID NO: 3500 - protein, 1621 aa, Homo sapiens
MRKRKISVCQQTWALLCKNFLKKWRMKRESLMEWLNSLLLLLCLYIYPHSHQVNDFSSLLTMDLGRVDTFNESRFSVVYTPVTNTTQQIMNKVASTPFLAGKEVLGLPDEESIKEFTANYPEEIVRVTFTNTYSYHLKFLLGHGMPAKKEHKDHTAHCYETNEDVYCEVSVFWKEGFVALQAAINAAIIEITTNHSVMEELMSVTGKNMKMHSFIGQSGVITDLYLFSCIISFSSFIYYASVNVTRERKRMKALMTMMGLRDSAFWLSWGLLYAGFIFIMALFLALVIRSTQFIILSGFMVVFSLFLLYGLSLVALAFLMSILVKKSFLTGLVVFLLTVFWGCLGFTSLYRHLPASLEWILSLLSPFAFMLGMAQLLHLDYDLNSNAFPHPSDGSNLIVATNFMLAFDTCLYLALAIYFEKILPNEYGHRRPPLFFLKSSFWSQTQKTDHVALEDEMDADPSFHDSFEQAPPEFQGKEAIRIRNVTKEYKGKPDKIEALKDLVFDIYEGQITAILGHSGAGKSTLLNILSGLSVPTKGSVTIYNNKLSEMADLENLSKLTGVCPQSNVQFDFLTVRENLRLFAKIKGILPQEVDKEIQRVLLELEMKNIQDVLAQNLSGGQKRKLTFGIAILGDPQIFLLDEPTAGLDPFSRHQVWNLLKERKTDRVILFSTQFMDEADILADRKVFLSQGKLKCAGSSLFLKKKWGIGYHLSLQLNEICVEENITSLVKQHIPDAKLSAKSEGKLIYTLPLERTNKFPELYKDLDSYPDLGIENYGVSMTTLNEVFLKLEGKSTINESDIAILGEVQAEKADDTERLVEMEQVLSSLNKMRKTIGGVALWRQQICAIARVRLLKLKHERKALLALLLILMAGFCPLLVEYTMVKIYQNSYTWELSPHLYFLAPGQQPHDPLTQLLIINKTGASIDDFIQSVEHQNIALEVDAFGTRNGTDDPSYNGAITVCCNEKNYSFSLACNAKRLNCFPVLMDIVSNGLLGMVKPSVHIRTERSTFLENGQDNPIGFLAYIMFWLVLTSSCPPYIAMSSIDDYKNRARSQLRISGLSPSAYWFGQALVDVSLYFLVFVFIYLMSYISNFEDMLLTIIHIIQIPCAVGYSFSLIFMTYVISFIFRKGRKNSGIWSFCFYVVTVFSVAGFAFSIFESDIPFIFTFLIPPATMIGCLFLSSHLLFSSLFSEERMDVQPFLVFLIPFLHFIIFLFTLRCLEWKFGKKSMRKDPFFRISPRSSDVCQNPEEPEGEDEDVQMERVRTANALNSTNFDEKPVIIASCLRKEYAGKRKGCFSKRKNKIATRNVSFCVRKGEVLGLLGHNGAGKSTSIKVITGDTKPTAGQVLLKGSGGGDALEFLGYCPQENALWPNLTVRQHLEVYAAVKGLRKGDAEVAITRLVDALKLQDQLKSPVKTLSEGIKRKLCFVLSILGNPSVVLLDEPSTGMDPEGQQQMWQAIRATFRNTERGALLTTHYMAEAEAVCDRVAIMVSGRLRCIGSIQHLKSKFGKDYLLEMKVKNLAQVEPLHAEILRLFPQAARQERYSSLMVYKLPVEDVQPLAQAFFKLEKVKQSFDLEEYSLSQSTLEQVFLELSKEQELGDFEEDFDPSVKWKLLPQEEP

SEQ ID NO: 3501 - protein, 899 aa, Homo sapiens
GVFRCTFSVASWPCSTDAETIVQAEALASTVTLTAIAESPVIEVETEKKDVLDFGDLTYGGWKALPLKLINRTHATVPIRLIINANAVAWRCFTFSKESVRAPVEVAPCADVVTRLAGPSVVNHMMPASYDGQDPEFLMIWVLFHSPKKQISSSDILDSAEEFSAKVDIEVDSPNPTPVLRSVSLRARAGIARIHAPRDLQTMHFLAKVASSRKQHLPLKNAGNIEVYLDIKVPEQGSHFSVDPKNLLLKPGEEHEVIVSFTPKDPEACEERILKIFVQPFGPQYEVVLKGEVISSGSKPLSPGPCLDIPSILSNKQFLAWGGVPLGRTQLQKLALRNNSASTTQHLRLLIRGQDQDCFQLQNTFGSEQRLTSNCEIRIHPKEDIFISVLFAPTRLSCMLARLEIKQLGNRSQPGIKFTIPLSGYGGTSNLILEGVKKLSDSYMVTVNGLVPGKESKIVFSVRNTGSRAAFVKAVGFKDSQKKVLLDPKVLRIFPDKFVLKERTQENVTLIYNPSDRGINNKTATELSTVYLFGGDEISRQQYRRALLHKPEMIKQILPEHSVLQNINFVEAFQDELLVTEVYDLPQRPNDVQLFYGSMCKIILSVIGEFRDCISSREFLQPSSKASLESTSDLGASGKHGGNVSLDVLPVKGPQGSPLLSRAARPPLDQLASEEPWTVLPEHLILVAPSPCDMAKTGRFQIVNNSVRLLRFELCWPAHCLTVTPQHGCVAPESKLQILVSPNSSLSTKQSMFPWSGLIYIHCDDGQKKIVKVQIREDLTQVELLTRLTSKPFGILSPVSEPSVSHLVKPMTKPPSTKVEIRNKSITFPTTEPGETSESCLELENHGTTDVKWHLSSLAPPYVKGVDESGDVFRATYAAFRCSPISGLLESHGIQKQAA

SEQ ID NO: 3502 - protein, 265 aa, Homo sapiens
MTTSPILQLLLRLSLCGLLLQRAETGSKGQTAGELYQRWERYRRECQETLAAAEPPSGLACNGSFDMYVCWDYAAPNATARASCPWYLPWHHHVAAGFVLRQCGSDGQWGLWRDHTQCENPEKNEAFLDQRLILERLQVMYTVGYSLSLATLLLALLILSLFRRLHCTRNYIHINLFTSFMLRAAAILSRDRLLPRPGPYLGDQALALWNQALAACRTAQIVTQYCVGANYTWLLVEGVYLHSLLVLVGGSEEGHFRYYLLLGWD

SEQ ID NO: 3503 - protein, 574 aa, Homo sapiens
MWPSLLLLLLLPGPPPVAGLEDAAFPHLGESLQPLPRACPLRCSCPRVDTVDCDGLDLRVFPDNITRAAQHLSLQNNQLQELPYNELSRLSGLRTLNLHNNLISSEGLPDEAFESLTQLQHLCVAHNKLSVAPQFLPRSLRVADLAANQVMEIFPLTFGEKPALRSVYLHNNQLSNAGLPPDAFRGSEAIATLSLSNNQLSYLPPSLPPSLERLHLQNNLISKVPRGALSRQTQLRELYLQHNQLTDSGLDATTFSKLHSLEYLDLSHNQLTTVPAGLPRTLAILHLGRNRIRQVEAARLHGARGLRYLLLQHNQLGSSGLPAGALRPLRGLHTLHLYGNGLDRVPPALPRRLRALVLPHNHVAALGARDLVATPGLTELNLAYNRLASARVHHRAFRRLRALRSLDLAGNQLTRLPMGLPTGLRTLQLQRNQLRMLEPEPLAGLDQLRELSLAHNRLRVGDIGPGTWHELQALQMLDLSHNELSFVPPDLPEALEELHLEGNRIGHVGPEAFLSTPRLRALFLRANRLHMTSIAAEAFLGLPNLRVVDTAGNPEQVLIRLPPTTPRGPRAGGP

SEQ ID NO: 3504 - protein, 917 aa, Homo sapiens
MSTAIREVGVWRQTRTLLLKNYLIKCRTKKSSVQEILFPLFFLFWLILISMMHPNKKYEEVPNIELNPMDKFTLSNLILGYTPVTNITSSIMQKVSTDHLPDVIITEEYTNEKEMLTSSLSKPSNFVGVVFKDSMSYELRFFPDMIPVSSIYMDSRAGCSKSCEAAQYWSSGFTVLQASIDAAIIQLKTNVSLWKELESTKAVIMGETAVVEIDTFPRGVILIYLVIAFSPFGYFLAIHIVAEKEKKIKEFLKIMGLHDTAFWLSWVLLYTSLIFLMSLLMAVIATASLLFPQSSSIVIFLLFFLYGLSSVFFALMLTPLFKKSKHVGIVEFFVTVAFGFIGLMIILIESFPKSLVWLFSPFCHCTFVIGIAQVMHLEDFNEGASFSNLTAGPYPLIITIIMLTLNSIFYVLLAVYLDQVIPGEFGLRRSSLYFLKPSYWSKSKRNYEELSEGNVNGNISFSEIIEPVSSEFVGKEAIRISGIQKTYRKKGENVEALRNLSFDIYEGQITALLGHSGTGKSTLMNILCGLCPPSDGFASIYGHRVSEIDEMFEARKMIGICPQLDIHFDVLTVEENLSILASIKGIPANNIIQEVQKVLLDLDMQTIKDNQAKKLSGGQKRKLSLGIAVLGNPKILLLDEPTAGMDPCSRHIVWNLLKYRKANRVTVFSTHFMDEADILADRKAVISQGMLKCVGSSMFLKSKWGIGYRLSMYIDKYCATESLSSLVKQHIPGATLLQQNDQQLVYSLPFKDMDKFSGLFSALDSHSNLGVISYGVSMTTLEDVFLKLEVEAEIDQADYSVFTQQPLEEEMDSKSFDEMEQSLLILSETKAALVSTMSLWKQQMYTIAKFHFFTLKRESKSVRSVLLLLLIFFTVQIFMFLVHHSFKNAVVPIKLVPDLYFLKPGDKPHKYKTSLLL

SEQ ID NO: 3505 - protein, 528 aa, Homo sapiens
RLFWNEVRPFDWPCKNNRRCREFLWSKLEPIKVDTSRLEHLFESKSKELSVSKKTAADGKRQEIIVLDSKRSNAINIGLTVLPPPRTIKIAILNFDEYALNKEGIEKILTMIPTDEEKQKIQEAQLANPEIPLGSAEQFLLTLSSISELSARLHLWAFKMDYETTEKEVAEPLLDLKEGIDQLENNKTLGFILSTLLAIGNFLNGTNAKAFELSYLEKVPEVKDTVHKQSLLHHVCTMVVENFPDSSDLYSEIGAITRSAKVDFDQLQDNLCQMERRCKASWDHLKAIAKHEMKPVLKQRMSEFLKDCAERIIILKIVHRRIINRFHSFLLFMGHPPYAIREVNINKFCRIISEFALEYRTTRERVLQQKQKRANHRERNKTRGKMITDSGKFSGSSPAPPSQPQGLSYAEDAAEHENMKAVLKTSSPSVEDATPALGVRTRSRASRGSTSSWTMGTDDSPNVTDDAADEIMDRIVKSATQVPSQRVVPRERKRSRANRKSLRRTLKSGLTPEEARALGLVGTSELQL

SEQ ID NO: 3506 - protein, 856 aa, Homo sapiens
MIQAHISVSTQPNEVGPVAVLEFWVQALISQHLWYREQPILFLMDHLCKAAFQLMQEDCIQKLLYQQHKNALGYHCDRSLLSSLVSWIVAGNITPSFVEGLATPTQVWFAWTVLNMESIFEEDSQLRRVIEGELVINSAFTPDQALKKAQTQLKLPIVPSLQRLLIYRWAHQALVTPSDHPLLPLIWQKFFLLYLHRPGPQYGLPIDGCIGRRFFQSPAHINLLKEMKRRLTEVADFHHAASKALRVPAEGSEGLPESHSGTPGYLTSPELHKELVRLFNVYILWLEDENFQKGDTYIPSLPKHYDIHRLAKVMQNQQDLWMEYLNMERIYHEFQETVGLWTQAKLESHSTPCSLSVQLDFTDPLLAKERVLSNLRKHEAPQPPLALHPTKPPVPVISSAVLLSQKDATQLVCTDLNLLQQQARTAALRESQQVALDGELLDTMPKQYVNREEQTTLHLECRGSSGKKCQGAAVVTVQFEGMHKNEAISQQLHVLRKEVKQLQAEAAKPPSLNIVEAAVHAENLITALVNAYKLQPTPGIQKVGISLFFTIVDYVSDETQRHPPTRQFFTSCIEILGQVFISGIKSECRKVLETILKNSRLCSLLSPFFTPNAAPAEFIQLYEQVVKFLSEDNSDMIFMLLTKFDLKQWLSATKPPLSDRTRLLESIHLALTAWGLEPDEDILMPFNLFCKHWTYLLLYQFPDQYSDILRLLMQSSAEQLLSPECWKATLRALGCCAPSCQQGAASTEGAVLPSSSDALLSDKQVMETIQWLSDFFYKLRLSKMDFKSFGLFSKWSPYMADVKTFLGYLVKRLIDLEMTCLAQDPTASRKTVLKSLHSVIIQLFKPWILVLEDNER

SEQ ID NO: 3507 - protein, 154 aa, Homo sapiens
EKLVRVLFELARYHAPSTIFLDELESVMSQRGTASGGEHEGSLRMKTELLVQMDGLARSEDLVFVLAASNLPCLKAIALQPGDRARLRLKKKKSVLVHFHAAGEDISKTGKKKKLTGLTVSHGWGASESWRGAKDTSYMVAARENEEDARSGNP

SEQ ID NO: 3508 - protein, 466 aa, Homo sapiens
MTTSPILQLLLRLSLCGLLLQRAETGSKGQTAGELYQRWERYRRECQETLAAAEPPSGLACNGSFDMYVCWDYAAPNATARASCPWYLPWHHHVAAGFVLRQCGSDGQWGLWRDHTQCENPEKNEAFLDQRLILERLQVMYTVGYSLSLATLLLALLILSLFRRLHCTRNYIHINLFTSFMLRAAAILSRDRLLPRPGPYLGDQALALWNQALAACRTAQIVTQYCVGANYTWLLVEGVYLHSLLVLVGGSEEGHFRYYLLLGWGAPALFVIPWVIVRYLYENTQCWERNEVKAIWWIIRTPILMTILINFLIFIRILGILLSKLRTRQMRCRDYRLRLARSTLTLVPLLGVHEVVFAPVTEEQARGALRFAKLGFEIFLSSFQGFLVSVLYCFINKEVQSEIRRGWHHCRLRRSLGEEQRQLPERAFRALPSGSGPGEVPTSRGLSSGTLPGPGNEASRELESYC

SEQ ID NO: 3509 - protein, 161 aa, Homo sapiens
RETFSNFTASTEAQVKGLSTQGGNVGRKMKSLESQLEKQQKDLSEDHSSLLLHVKQFVSDLRSLSCQMAALQGNGSERTCCPVNWVEHERSCYWFSRSGKAWADADNYCRLEDAHLVVVTSWEEQKFVQHHIGPVNTWMGLHDQNGPWKWVDGTDYETGFK

SEQ ID NO: 3510 - protein, 250 aa, Homo sapiens
MSTAIREVGVWRQTRTLLLKNYLIKCRTKKSSVQEILFPLFFLFWLILISMMHPNKKYEEVPNIELNPMDKFTLSNLILGYTPVTNITSSIMQKVSTDHLPDVIITEEYTNEKEMLTSSLSKPSNFVGVVFKDSMSYELRFFPDMIPVSSIYMDSRAGCSKSCEAAQYWSSGFTVLQASIDAAIIQLKTNVSLWKELESTKAVIMGETAVVEIDTFPRGVILIYLVIAFSPFGYFLAIHIVAEKEKKIKE

SEQ ID NO: 3511 - protein, 146 aa, Homo sapiens
MGDERPHYYGKHGTPQKYDPTFKGPIYNRNKPYLFYFNIVKCASPLVLLEFQCPTPQICVEKCPDRYLTYLNARSSRDFEYYKQFCVPGFKNNKGVAEVLQDGDCPAVLIPSKPLARRCFPAIHAYKGVLMVGNETTYEDGHGSRK

SEQ ID NO: 3512 - protein, 659 aa, Homo sapiens; identical to SEQ ID NO: 3486

SEQ ID NO: 3513 - protein, 44 aa, Homo sapiens
MDPLGAAKPQWPWRRCLAALLFQLLVAVCFFSYLRVSRDDATGS

SEQ ID NO: 3514 - protein, 970 aa, Homo sapiens
APWTILGLDAMYVIMWITYMAFLLVFFGAFFAVWCYRKRYFVSEYTPIDSNIAFSVNASDKGTAWLLTSTFPSSPVLPGEASCCDPVSAAFEGCLRRLFTRWGSFCVRNPGCVIFFSLVFITACSSGLVFVRVTTNPVDLWSAPSSQARLEKEYFDQHFGPFFRTEQLIIRAPLTDKHIYQPYPSGADVPFGPPLDIQILHQVLDLQIAIENITASYDNETVTLQDICLAPLSPYNTNCTILSVLNYFQNSHSVLDHKKGDDFFVYADYHTHFLYCVRFINFVKNYKNPNLTISFTAERSIEDELNRESDSDVFTVVISYAIMFLYISLALGHMKSCRRLLVDSKVSLGIAGILIVLSSVACSLGVFSYIGLPLTLIVIEVIPFLVLAVGVDNIFILVQAYQRDERLQGETLDQQLGRVLGEVAPSMFLSSFSETVAFFLGALSVMPAVHTFSLFAGLAVFIDFLLQITCFVSLLGLDIKRQEKNRLDIFCCVRGAEDGTSVQASESCLFRFFKNSYSPLLLKDWMRPIVIAIFVGVLSFSIAVLNKVDIGLDQSLSMPDDSYMVDYFKSISQYLHAGPPVYFVLEEGHDYTSSKGQNMVCGGMGCNNDSLVQQIFNAAQLDNYTRIGFAPSSWIDDYFDWVKPQSSCCRVDNITDQFCNASVVDPACVRCRPLTPEGKQRPQGGDFMRFLPMFLSDNPNPKCGKGGHAAYSSAVNILLGHGTRVGATYFMTYHTVLQTSADFIDALKKARLIASNVTETMGINGSAYRVFPYSVFYVFYEQYLTIIDDTIFNLGVSLGAIFLVTMVLLGCELWSAVIMCATIAMVLVNMFGVMWLWGISLNAVSLVNLVMSCGISVEFCSHITRAFTVSMKGSRVERAEEALAHMGSSVFSGITLTKFGGIVVLAFAKSQIFQIFYFRMYLAMVLLGATHGLIFLPVLLSYIGPSVNKAKSCATEERYKGTERERLLNF

SEQ ID NO: 3515 - protein, 1115 aa, Homo sapiens
MQSDLARLQEGRQPEHRDVTLQKVLDSEKLLYVLEADAAIAKHMKHPQGDMIAEDIRQLKERVTNLRGKHKQIYRLAVKEVDPQAQKSLLGEVEQNLQAAKQCSSTLASRFQEHCPDLERQEAEVHKLGQRFNNLRQQVERRAQSLQSAKAAYEHFHRGHDHVLQFLVSIPSYEPQETDSLSQMETKLKNQKNLLDEIASREQEVQKICANSQQYQQAVKDYELEAEKLRSLLDLENGRRSHVSKRARLQSPATKVKEEEAALAAKFTEVYAINRQRLQNLEFALNLLRQQPEVEVTHETLQRNRPDSGVEEAWKIRKELDEETERRRQLENEVKSTQEEIWTLRNQGPQESVVRKEVLKKVPDPVLEESFQQLQRTLAEEQHKNQLLQEELEALQLQLRALEQETRDGGQEYVVKEVLRIEPDRAQADEVLQLREELEALRRQKGAREAEVLLLQQRVAALAEEKSRAQEKVTEKEVVKLQNDPQLEAEYQQLQEDHQRQDQLREKQEEELSFLQDKLKRLEKERAMAEGKITVKEVLKVEKDAATEREVSDLTRQYEDEAAKARASQREKTELLRKIWALEEENAKVVVQEKVREIVRPDPKAESEVANLRLELVEQERKYRGAEEQLRSYQSELEALRRRGPQVEVKEVTKEVIKYKTDPEMEKELQRLREEIVDKTRLIERCDLEIYQLKKEIQALKDTKPQVQTKEVVQEILQFQEDPQTKEEVASLRAKLSEEQKKQVDLERERASQEEQIARKEEELSRVKERVVQQEVVRYEEEPGLRAEASAFAESIDVELRQIDKLRAELRRLQRRRTELERQLEELERERQARREAEREVQRLQQRLAALEQEEAEAREKVTHTQKVVLQQDPQQAREHALLRLQLEEEQHRRQLLEGELETLRRKLAALEKAEVKEKVVLSESVQVEKGDTEQEIQRLKSSLEEESRSKRELDVEVSRLEARLSELEFHNSKSSKELDFLREENHKLQLERQNLQLETRRLQSEINMAATETRDLRNMTVADSGTNHDSRLWSLERELDDLKRLSKDKDLEIDELQKRLGSVAVKREQRENHLRRSIVVIHPDTGRELSPEEAHRAGLIDWNMFVKLRSQECD

SEQ ID NO: 3516 - protein, 132 aa, Homo sapiens
MLDQSLFWPPSEFSPVSDGFYLSHWTMKAGTLLSRHKERGVKCTDCPSSEKIALETSLSKELVASGMGWAAFNLSNVTGNSRILCSVYCNGSQITGSSNITVYRLPERVELAPLPPWQPVGQNFTLRCQVED

SEQ ID NO: 3517 - protein, 705 aa, Homo sapiens
MPLPGGLWWLLCCRRGFTLLHRDYGDGELSGDGDEDEDEETFELRTPSPAGGGRGPLEVTLTQPVRSGPVSNRLQSWEETWSLIPEKGLPEDDPDIVVKGWLYREPRGGGARPWLPPRRAWFVLTRDSLDQFSSSGKGARRLGSLVLTSLCSVTGPERRRKETGLWSVTVSGRKHSVRLCSPRQAEAERWGVALREVIASKAPLETPTQLLLRDIQESCGDPEAVALIYLRNPILRHTSGALYAPLLPLPYGVSAPGPGYAPLREEAVRLFLALQALEGARRPGPLMQGVLQTCRDLPALRDELFLQLAKQTSGPAGPPGLPATQDPAALRYWQLLTCMSCTFRPGGAVRGHLLGHLERTEQALPDSELAEYARFIRKALGRTRGRELVPSLAEISALSQRQELLCTVHCPGAGACAVAIDSHTTAGEVARELVGRLGLARSRNAFALYEQRGAQERALAGGTLVADVLTRFENLAAEEAGLEDSPDSGWRLCLRLHGPLHPEGLSPDGHELPFLFEQAHALLLRGRPPPPDDTLRALAALRLQSLQRDFSPRVPLPRLDRLLPPPAPPREDPPRPTPRPPPSAALLAGALWSPGLAKRRAERARRGGAGRTAGSIAREGGGGAGTAAAVLGGWKRLRGMGRAEAMAAYLALAAQCPGFGAARSLVGVLHRSCAWAWEPRPCPSPGQGRRSPSTVSAMAMWPPAS

SEQ ID NO: 3518 - protein, 294 aa, Homo sapiens
MYPELQIARVEQATQAIPMERWCGGSRSGSCAHPHHQVVPFRCLPGEFVSEALLVPEGCRFLHQERMDQCESSTRRHQEAQEACSSQGLILHGSGMLLPCGSDRFRGVEYVCCPPPGTPDPSGTAVGDPSTRSWPPGSRVEGAEDEEEEESFPQPVDDYFVEPPQAEEEEETVPPPSSHTLAVVGKVTPTPRPTDGVDIYFGMPGEISEHEGFLRAKMDLEERRMRQINEVMREWAMADNQSKNLPKADRQALNEHFQSILQTLEEQVSGERQRLVETHATRVIALINDQRRAA

SEQ ID NO: 3519 - protein, 938 aa, Homo sapiens
MNLCGLMPIFPAPLDQVADMEELTIWEQHTATLSKDPRRGFGIAISGGRDRPGGSMVVSDVVPGGPAEGRLQTGDHIVMVNGVSMENATSAFAIQILKTCTKMANITVKRPRRIHLPATKASPSSPGRQDSDEDDGPQRVEEVDQGRGYDGDSSSGSGRSWDERSRRPRPGRRGRAGSHGRRSPGGGSEANGLALVSGFKRLPRQDVQMKPVKSVLVKRRDSEEFGVKLGSQIFIKHITDSGLAARHRGLQEGDLILQINGVSSQNLSLNDTRRLIEKSEGKLSLLVLRDRGQFLVNIPPAVSDSDSSPLEDISDLASELSQAPPSHIPPPPRHAQRSPEASQTDSPVESPRLRRESSVDSRTISEPDEQRSELPRESSYDIYRVPSSQSMEDRGYSPDTRVVRFLKGKSIGLRLAGGNDVGIFVSGVQAGSPADGQGIQEGDQILQVNDVPFQNLTREEAVQFLLGLPPGEEMELVTQRKQDIFWKMVQSRVGDSFYIRTHFELEPSPPSGLGFTRGDVFHVLDTLHPGPGQSHARGGHWLAVRMGRDLREQERGIIPNQSRAEQLASLEAAQRAVGVGPGSSAGSNARAEFWRLRGLRRGAKKTTQRSREDLSALTRQGRYPPYERVVLREASFKRPVVILGPVADIAMQKLTAEMPDQFEIAETVSRTDSPSKIIKLDTVRVIAEKDKHALLDVTPSAIERLNYVQYYPIVVFFIPESRPALKALRQWLAPASRRSTRRLYAQAQKLRKHSSHLFTATIPLNGTSDTWYQELKAIIREQQTRPIWTAEDQLDGSLEDNLDLPHHGLADSSADLSCDSRVNSDYETDGEGGAYTDGEGYTDGEGGPYTDVDDEPPAPALARSSEPVQADESQSPRDRGRISAHQGAQVDSRHPQGQWRQDSMRTYEREALKKKFMRVHDAESSDEDGYDWGPATDL

SEQ ID NO: 3520 - protein, 627 aa, Homo sapiens
MDSVVFEDVAVDFTLEEWALLDSAQRDLYRDVMLETFQNLASVDDETQFKASGSVSQQDIYGEKIPKESKIATFTRNVSWASVLGKIWDSLSIEDQTTNQGRNLRNHGLERLCESNDQCGEALSQIPHLNLYKKIPPGVKQYEYNTYGKVFMHRRTSLKSPITVHTGHKPYQCQECGQAYSCRSHLRMHVRTHNGERPYVCKLCGKTFPRTSSLNRHVRIHTAEKTYECKQCGKAFIDFSSLTSHLRSHTGEKPYKCKECGKAFSYSSTFRRHTITHTGEKPYKCKECAEAFSYSSTFRRHMISHTGEKPHKCKECGEAFSYSSAFRRHMITHTGEKPYECKQCGKTFIYLQSFRRHERIHTGEKPYECKQCGKTFIYPQSFRRHERTHGGEKPYECNQCGKAFSHPSSFRGHMRVHTGEKPYECKQCGKTFNWPISLRKHMRTHTREKPYECKQCGKAFSLSACFREHVRMHPEDKSYECKLCGKAFYCHISLQKHMRRHTAEKLYKCKQCGKAFSWPELLQQHVRTHTVEKPYECKECGKVFKWPSSLPIHMRLHTGEKPYQCKHCGKAFNCSSSLRRHVRIHTTEKQYKCNVGHPPANEFMCSASEKSHQERDLIKVVNMVLPL

SEQ ID NO: 3521 - protein, 125 aa, Homo sapiens
MSIVTVQLGQCGNQIGFEVFDALLSDSHSSQGLCSMRENEAYQASCKERFFSEEENGVPIARAVLVDMEPKVINQMLSKAAQSGQWKYGQHACFCQKQGSGNNWAYGRDKDSACYPDWSGTPGLQ

SEQ ID NO: 3522 - protein, 859 aa, Homo sapiens
MAQVLHVPAPFPGTPGPASPPAFPAKDPDPPYSVETPYGYRLDLDFLKYVDDIEKGHTLRRVAVQRRPRLSSLPRGPGSWWTSTESLCSNASGDSRHSAYSYCGRGFYPQYGALETRGGFNPRVERTLLDARRRLEDQAATPTGLGSLTPSAAGSTASLVGVGLPPPTPRSSGLSTPVPPSAGHLAHVREQMAGALRKLRQLEEQVKLIPVLQVKLSVLQEEKRQLTVQLKSQKFLGHPTAGRGRSELCLDLPDPPEDPVALETRSVGTWVRERDLGMPDGEAALAAKVAVLETQLKKALQELQAAQARQADPQPQAWPPPDSPVRVDTVRVVEGPREVEVVASTAAGAPAQRAQSLEPYGTGLRALAMPGRPESPPVFRSQEVVETMCPVPAAATSNVHMVKKISITERSCDGAAGLPEVPAESSSSPPGSEVASLTQPEKSTGRVPTQEPTHREPTRQAASQESEEAGGTAPPLSSPPGGPPAGVRSIMKRKEEVADPTAHRRSLQFVGVNGGYESSSEDSSTAENISDNDSTENEAPEPRERVPSVAEAPQLRPAGTAAAKTSRQECQLSRESQHIPTAEGASGSNTEEEIRMELSPDLISACLALEKYLDNPNALTERELKVAYTTVLQEWLRLACRSDAHPELVRRHLVTFRAMSARLLDYVVNIADSNGNTALHYSVSHANFPVVQQLLDSGVCKVDKQNRAGYSPIMLTALATLKTQDDIETVLQLFRLGNINAKASQAGQTALMLAVSHGRVDVVKALLACEADVNVQDDDGSTALMCACEHGHKEIAGLLLAVPSCDISLTDRDGSTALMVALDAGQSEIASMLYSRMNIKCSFAPMSDDESPTSSSAEE

SEQ ID NO: 3523 - protein, 122 aa, Homo sapiens
DALCSGEICNTEGISSVVQPDKYKPVPDEPPNPTNIEEILKRVRSNDKELEEVNLNNIQAVADMLRENRSLQSLNIESNFISSTGLMAVLKAVRENATLTELRVDNQVASKRRDNTAFPFTN

SEQ ID NO: 3524 - protein, 766 aa, Homo sapiens
MDWQPDEQGLQQVLQLLKDSQSPNTATQRIVQDKLKQLNQFPDFNNYLIFVLTRLKSEDEPTRSLSGLILKNNVKAHYQSFPPPVADFIKQECLNNIGDASSLIRATIGILITTIASKGELQMWPELLPQLCNLLNSEDYNTCEGAFGALQKICEDSSELLDSDALNRPLNIMIPKFLQFFKHCSPKIRSHAIACVNQFIMDRAQALMDNIDTFIEHLFALAVDDDPEVRKNVCRALVMLLEVRIDRLIPHMHSIIQYMLQRTQDHDENVALEACEFWLTLAEQPICKEVLASHLVQLIPILVNGMKYSEIDIILLKGDVEEDEAVPDSEQDIKPRFHKSRTVTLPHEAERPDGSEDAEDDDDDDALSDWNLRKCSAAALDVLANVFREELLPHLLPLLKGLLFHPEWVVKESGILVLGAIAEGCMQGMVPYLPELIPHLIQCLSDKKALVRSIACWTLSRYAHWVVSQPPDMHLKPLMTELLKRILDGNKRVQEAACSAFATLEEEACTELVPYLSYILDTLVFAFGKYQHKNLLILYDAIGTLADSVGHHLNQPEYIQKLMPPLIQKWNELKDEDKDLFPLLECLSSVATALQSGFLPYCEPVYQRCVTLVQKTLAQAMMYTQHPEQYEAPDKDFMIVALDLLSGLAEGLGGHVEQLVARSNIMTLLFQCMQDSMPEVRQSSFALLGDLTKACFIHVKPCIAEFMPILGTNLNPEFISVCNNATWAIGEICMQMGAEMQPYVQMVLNNLVEIINRPNTPKTLLE

SEQ ID NO: 3525 - protein, 639 aa, Homo sapiens
MPSTSFPVPSKFPLGPAAAVFGRGETLGPAPRAGGTMKSAEEEHYGYASSNVSPALPLPTAHSTLPAPCHNLQTSTPGIIPPADHPSGYGAALDGGPAGYFLSSGHTRPDGAPALESPRIEITSCLGLYHNNNQFFHDVEVEDVLPSSKRSPSTATLSLPSLEAYRDPSCLSPASSLSSRSCNSEASSYESNYSYPYASPQTSPWQSPCVSPKTTDPEEGFPRGLGACTLLGSPRHSPSTSPRASVTEESWLGARSSRPASPCNKRKYSLNGRQPPYSPHHSPTPSPHGSPRVSVTDDSWLGNTTQYTSSAIVAAINALTTDSSLDLGDGVPVKSRKTTLEQPPSVALKVEPVGEDLGSPPPPADFAPEDYSSFQHIRKGGFCDQYLAVPQHPYQWAKPKPLSPTSYMSPTLPALDWQLPSHSGPYELRIEVQPKSHHRAHYETEGSRGAVKASAGGHPIVQLHGYLENEPLMLQLFIGTADDRLLRPHAFYQVHRITGKTVSTTSHEAILSNTKVLEIPLLPENSMRAVIDCAGILKLRNSDIELRKGETDIGRKNTRPSAQLRSCLWWRSRARTAIRSWAGRRWSCLATTSCRTPRSFSWRKPQMATMSGRWKRKLTGTCASRILWWLRSRHFGIRG

SEQ ID NO: 3526 - protein, 469 aa, Homo sapiens
MLPPWTLGLLLLATVRGKEVCYGQLGCFSDEKPWAGTLQRPVKLLPWSPEDIDTRFLLYTNENPNNFQLITGTEPDTIEASNFQLDRKTRFIIHGFLDKAEDSWPSDMCKKMFEVEKVNCICVDWRHGSRAMYTQAVQNIRVVGAETAFLIQALSTQLGYSLEDVHVIGHSLGAHTAAEAGRRLGGRVGRITGLDPAGPCFQDEPEEVRLDPSDAVFVDVIHTDSSPIVPSLGFGMSQKVGHLDFFPNGGKEMPGCKKNVLSTITDIDGIWEGIGGFVSCNHLRSFEYYSSSVLNPDGFLGYPCASYDEFQESKCFPCPAEGCPKMGHYADQFKGKTSAVEQTFFLNTGESGNFTSWRYKISVTLSGKEKVNGYIRIALYGSNENSKQYEIFKGSLKPDASHTCAIDVDFNVGKIQKVKFLWNKRGINLSEPKLGASQITVQSGEDGTEYNFCSSDTVEENVLQSLYPC

SEQ ID NO: 3527 - protein, 1029 aa, Homo sapiens
MSDVNPPSDTPIPFSSSSTHSSHIPPWTFSCYPGSPCENGVMLYMRNVSHEELQRFKQLLLTELSTGTMPITWDQVETASWAEVVHLLIERFPGRRAWDVTSNIFAIMNCDKMCVVVRREINAILPTLEPEDLNVGETQVNLEEGESGKIRRYKSNVMEKFFPIWDITTWPGNQRDFFYQGVHRHEEYLPCLLLPKRPQGRQPKTVAIQGAPGIGKTILAKKVMFEWARNKFYAHKRWCAFYFHCQEVNQTTDQSFSELIEQKWPGSQDLVSKIMSKPDQLLLLLDGFEELTSTLIDRLEDLSEDWRQKLPGSVLLSSLLSKTMLPEATLLIMIRFTSWQTCKPLLKCPSLVTLPGFNTMEKIKYFQMYFGHTEEGDQVLSFAMENTILFSMCRVPVVCWMVCSGLKQQMERGNNLTQSCPNATSVFVRYISSLFPTRAENFSRKIHQAQLEGLCHLAADSMWHRKWVLGKEDLEEAKLDQTGVTAFLGMSILRRIAGEEDHYVFTLVTFQEFFAALFYVLCFPQRLKNFHVLSHVNIQRLIASPRGSKSYLSHMGLFLFGFLNEACASAVEQSFQCKVSFGNKRKLLKVIPLLHKCDPPSPGSGVPQLFYCLHEIREEAFVSQALNDYHKVVLRIGNNKEVQVSAFCLKRCQYLHEVELTVTLNFMNVWKLSSSSHPGSEAPESNGLHRWWQDLCSVFATNDKLEVLTMTNSVLGPPFLKALAAALRHPQCKLQKLLLRRVNSTMLNQDLIGVLTGNQHLRYLEIQHVEVESKAVKLLCRVLRSPRCRLQCLRLEDCLATPRIWTDLGNNLQGNGHLKTLILRKNSLENCGAYYLSVAQLERLSQSKMLTHLSLAENALKDEGAKHIWNALPHLRCPLQRLVLRKCDLTFNCCQDMISALCKNKTLKSLDLSFNSLKDDGVILLCEALKNPDCTLQILELENCLFTSICCQAMASMLRKNQHLRHLDLSKNAIGVYGILTLCEAFSSQKKREEVIFCIPAWTRITSFSPTPHPPDFTGKSDCLSQINP

SEQ ID NO: 3528 - protein, 1199 aa, Homo sapiens
FRLVVKTALKLLLVFVEYSESNAPLLIQAVTAVDTKRGVKPWSNIMEILEEKDGVDTELLVYAMTLVNKTLSGLPDQDTFYDVVDCLEELGIAAVSQRHLNKKGTDLDLVEQLNIYEVALRHEDGDETTEPPPSGCRDRRRASVCSSGGGEHRGLDRRRSRRHSVQSIKSTLSAPTSPCSQSAPSFKPNQVRDLREKSSPSGLLTSSFRQHQESLAAERERRRQEREERLQRIEREERNKFSRDYLDKREEQRQAREERYKYLEQLAAEEHEKELRSRSVSRGRADLSLDLTSPAAPACLAPLSHSPSSSDSQEALTVSASSPGTPHHPQASAGDPEPESEAEPEAEAGAGQVADEAGQDIASAHEGAETEVEQALEQEPEERASLSEKERQNEGVNERDNCSASSVSSSSSTLEREEKEDKLSRDRTTGLWPAGVQDAGVNGQCGDILTNKRFMLDMLYAHNRKSPDDEEKGDGEAGRTQQEAEAVASLATRISTLQANSQTQDESVRRVDVGCLDNRGSVKAFAEKFNSGDLGRGSISPDAEPNDKVPETAPVQPKTESDYIWDQLMANPRELRIQDMDFTDLGEEDDIDVLDVDLGHREAPGPPPPPPPTFLGLPPPPPPPLLDSIPPPPVPGNLLVPPPPVFNAPQGLGWSQVPRGQPTFTKKKKTIRLFWNEVRPFDWPCKNNRRCREFLWSKLEPIKVDTSRLEHLFESKSKELSVSKKTAADGKRQEIIVLDSKRSNAINIGLTVLPPPRTIKIAILNFDEYALNKEGIEKILTMIPTDEEKQKIQEAQLANPEIPLGSAEQFLLTLSSISELSARLHLWAFKMDYETTEKEVAEPLLDLKEGIDQLENNKTLGFILSTLLAIGNFLNGTNAKAFELSYLEKVPEVKDTVHKQSLLHHVCTMVVENFPDSSDLYSEIGAITRSAKVDFDQLQDNLCQMERRCKASWDHLKAIAKHEMKPVLKQRMSEFLKDCAERIIILKIVHRRIINRFHSFLLFMGHPPYAIREVNINKFCRIISEFALEYRTTRERVLQQKQKRANHRERNKTRGKMITDSGKFSGSSPAPPSQPQGLSYAEDAAEHENMKAVLKTSSPSVEDATPALGVRTRSRASRGSTSSWTMGTDDSPNVTDDAADEIMDRIVKSATQVPSQRVVPRERKRSRANRKSLRRTLKSGLTPEEARALGLVGTSELQL

SEQ ID NO: 3529 - protein, 470 aa, Homo sapiens
MGWAAFNLSNVTGNSRILCSVYCNGSQITGSSNITVYRLPERVELAPLPPWQPVGQNFTLRCQVEDGSPRTSLTVVLLRWEEELSRQPAVEEPAEVTATVLASRDDHGAPFSCRTELDMQPQGLGLFVNTSAPRQLRTFVLPVTPPRLVAPRFLEVETSWPVDCTLDGLFPASEAQVYLALGDQMLNATVMNHGDTLTATATATARADQEGAREIVCNVTLGGERREARENLTVFSFLGPIVNLSEPTAHEGSTVTVSCMAGARVQVTLDGVPAAAPGQPAQLQLNATESDDGRSFFCSATLEVDGEFLHRNSSVQLRVLYGPKIDRATCPQHLKWKDKTRHVLQCQARGNPYPELRCLKEGSSREVPVGIPFFVNVTHNGTYQCQASSSRGKYTLVVVMDIEAGSSHFVPVFVAVLLTLGVVTIVLALMYVFREHQRSGSYHVREESTYLPLTSMQPTEAMGEEPSRAE

SEQ ID NO: 3530 - protein, 604 aa, Homo sapiens
MNRKDSKRKSHQECTGKIGGRGRPRQVRRHKTCPSPREISKVMASMNLGLLSEGGCSEDELLEKCIQSFDSAGSLCHEDHMLNMVLAMHSWVLPSADLAARLLTSYQKATGDTQELRRLQICHLVRYWLMRHPEVMHQDPQLEEVIGRFWATVAREGNSAQRRLGDSSDLLSPGGPGPPLPMSSPGLGKKRKVSLLFDHLETGELAQHLTYLEFRSFQAITPQDLRSYVLQGSVRGCPALEGSVGLSNSVSRWVQVMVLSRPGPLQRAQVLDKFIHVAQRLHQLQNFNTLMAVTGGLCHSAISRLKDSHAHLSPDSTKELVALQGQHPPCSANEDLLHLLTLSLDLFYTEDEIYELSYAREPRCPKSLPPSPFNAPLVVEWAPGVTPKPDRVTLGRHVEQLVESVFKNYDPEGRGTISQEDFERLSGNFPFACHGLHPPPRQGRGSFSREELTGYLLRASAICSKLGLAFLHTFHEVTFRKPTFCDSCSGFLWGVTKQGYRCRECGLCCHKHCRDQVKVECKKRPGAKGDAGPPGAPVPSTPAPHASCGSEENHSYTLSLEPETGCQLRHAWTQTESPHPSWETDTVPCPVMDPPSTASSKLDS

SEQ ID NO: 3531 - protein, 864 aa, Homo sapiens
MKRSRSALSVAGTGDERSRETPESDRANMLGADLRRPRRRLSSGPGLGWAQPEPSDPGVPLPPRPTTLPLLIPPRISITRAENDSFEAENGPTPSPGRSPLDSQASPGLVLHAGAATSQRRESFLYRSDSDYDMSPKTMSRNSSVTSEAHAEDLIVTPFAQVLASLRSVRSNFSLLTNVPVPSNKRSPLGGPTPVCKATLSEETCQQLARETLEELDWCLEQLETMQTYRSVSEMASHKFKRMLNRELTHLSEMSRSGNQVSEYISTTFLDKQNEVEIPSPTMKEREKQQAPRPRPSQPPPPPVPHLQPMSQITGLKKLMHSNSLNNSNIPRFGVKTDQEELLAQELENLNKWGLNIFCVSDYAGGRSLTCIMYMIFQERDLLKKFRIPVDTMVTYMLTLEDHYHADVAYHNSLHAADVLQSTHVLLATPALDAVFTDLEILAALFAAAIHDVDHPGVSNQFLINTNSELALMYNDESVLENHHLAVGFKLLQEDNCDIFQNLSKRQRQSLRKMVIDMVLATDMSKHMTLLADLKTMVETKKVTSSGVLLLDNYSDRIQVLRNMVHCADLSNPTKPLELYRQWTDRIMAEFFQQGDRERERGMEISPMCDKHTASVEKSQVGFIDYIVHPLWETWADLVHPDAQEILDTLEDNRDWYYSAIRQSPSPPPEEESRGPGHPPLPDKFQFELTLEEEEEEEISMAQIPCTAQEALTAQGLSGVEEALDATIAWEASPAQESLEVMAQEASLEAELEAVYLTQQAQSTGSAPVAPDEFSSREEFVVAVSHSSPSALALQSPLLPAWRTLSVSEHAPGLPGLPSTAAEVEAQREHQAAKRACSACAGTFGEDTSALPAPGGGGSGGDPT

SEQ ID NO: 3532 - protein, 104 aa, Homo sapiens
MMMGSARVAELLLLHGAEPNCADPATLTRPVHDAAREGFLDTLVVLHRAGARLDVRDAWGRLPVDLAEELGHRDVARYLRAAAGGTRGSNHARIDAAEGPSGED

SEQ ID NO: 3533 - protein, 100 aa, Homo sapiens
MDPLGAAKPQWPWRRCLAALLFQLLVAVCFFSYLRVSRDDATGSPRAPSGSSRQDTTPTRPTLLILLRTWPFHIPVALSRCSEMVPGTADCHITADRKVY

SEQ ID NO: 3534 - protein, 398 aa, Homo sapiens
MDPVVGCGRGLFGFVFSAGGPRGVLPRPCRVLVLLNPRGGKGKALQLFRSHVQPLLAEAEISFTLMLTERRNHARELVRSEELGRWDALVVMSGDGLMHEVVNGLMERPDWETAIQKPLCSLPAGSGNALAASLNHYAGYEQVTNEDLLTNCTLLLCRRLLSPMNLLSLHTASGLRLFSVLSLAWGFIADVDLESEKYRRLGEMRFTLGTFLRLAALRTYRGRLAYLPVGRVGSKTPASPVVVQQGPVDAHLVPLEEPVPSHWTVVPDEDFVLVLALLHSHLGSEMFAAPMGRCAAGVMHLFYVRAGVSRAMLLRLFLAMEKGRHMEYECPYLVYVPVVAFRLEPKDGKGVFAVDGELMVSEAVQGQVHPNYFWMVSGCVEPPPSWKPQQMPPPEEPL

SEQ ID NO: 3535 - protein, 961 aa, Homo sapiens
MPIVDKLKEALKPGRKDSADDGELGKLLASSAKKVLLQKIEFEPASKSFSYQLEALKSKYVLLNPKTEGASRHKSGDDPPARRQGSEHTYESCGDGVPAPQKVLFPTERLSLRWERVFRVGAGLHNLGNTCFLNATIQCLTYTPPLANYLLSKEHARSCHQGSFCMLCVMQNHIVQAFANSGNAIKPVSFIRDLKKIARHFRFGNQEDAHEFLRYTIDAMQKACLNGCAKLDRQTQATTLVHQIFGGYLRSRVKCSVCKSVSDTYDPYLDVALEIRQAANIVRALELFVKADVLSGENAYMCAKCKKKVPASKRFTIHRTSNVLTLSLKRFANFSGGKITKDVGYPEFLNIRPYMSQNNGDPVMYGLYAVLVHSGYSCHAGHYYCYVKASNGQWYQMNDSLVHSSNVKVVLNQQAYVLFYLRIPGSKKSPEGLISRTGSSSLPGRPSVIPDHSKKNIGNGIISSPLTGKRQDSGTMKKPHTTEEIGVPISRNGSTLGLKSQNGCIPPKLPSGSPSPKLSQTPTHMPTILDDPGKKVKKPAPPQHFSPRTAQGLPGTSNSNSSRSGSQRQGSWDSRDVVLSTSPKLLATATANGHGLKGNDESAGLDRRGSSSSSPEHSASSDSTKAPQTPRSGAAHLCDSQETNCSTAGHSKTPPSGADSKTVKLKSPVLSNTTTEPASTMSPPPAKKLALSAKKASTLWRATGNDLRPPPPSPSSDLTHPMKTSHPVVASTWPVHRARAVSPAPQSSSRLQPPFSPHPTLLSSTPKPPGTSEPRSCSSISTALPQVNEDLVSLPHQLPEASEPPQSPSEKRKKTFVGEPQRLGSETRLPQHIREATAAPHGKRKRKKKKRPEDTAASALQEGQTQRQPGSPMYRREGQAQLPAVRRQEDGTQPQVNGQQVGCVTDGHHASSRKRRRKGAEGLGEEGGLHQDPLRHSCSPMGDGDPEAMEESPRKKKKKKR

SEQ ID NO: 3536 - protein, 1335 aa, Homo sapiens
LSEGNVEQELRASLAALRLASPEPLVAFSHHVLDKLVRLVIRPPIISGQIVNLGRGAFEAMAHVVSLVHRSLEAAQDARGHCPQLAAYVHYAFRLPGTEPSLPDGAPPVTVQAATLARGSGRPASLYLARSKSISSSNPDLAVAPGSVDDEVSRILASKGIDRSHSWVNSAYAPGGSKAVLRRAPPYCGADPRQLLHEELALQWVVSSSAVREAILQHAWFFFQLMVKSMALHLLLGQRLDTPRKLRFPGRFLDDITALVGSVGLEVITRVHKDVELAEHLNASLAFFLSDLLSLVDRGFVFSLVRAHYKQVATRLQSSPNPAALLTLRMEFTRILCSHEHYVTLNLPCCPLSPPASPSPSVSSTTSQSSTFSSQAPDPKVTSMFELSGPFRQQHFLAGLLLTELALALEPEAEGAFLLHKKAISAVHSLLCGHDTDPRYAEATVKARVAELYLPLLSIARDTLPRLHDFAEGPGQRSRLASMLDSDTEGEGDIAGTINPSVAMAIAGGPLAPGSRASISQGPPTASRAGCALSAESSRTLLACVLWVLKNTEPALLQRWATDLTLPQLGRLLDLLYLCLAAFEYKGKKAFERINSLTFKKSLDMKARLEEAILGTIGARQEMVRRSRERSPFGNPENVRWRKSVTHWKQTSDRVDKTKDEMEHEALVEGNLATEASLVVLDTLEIIVQTVMLSEARESVLGAVLKVVLYSLGSAQSALFLQHGLATQRALVSKFPELLFEEDTELCADLCLRLLRHCGSRISTIRTHASASLYLLMRQNFEIGHNFARVKMQVTMSLSSLVGTTQNFSEEHLRRSLKTILTYAEEDMGLRDSTFAEQVQDLMFNLHMILTDTVKMKEHQEDPEMLIDLMYRIARGYQGSPDLRLTWLQNMAGKHAELGNHAEAAQCMVHAAALVAEYLALLEDHRHLPVGCVSFQNISSNVLEESAISDDILSPDEEGFCSGKHFTELGLVGLLEQAAGYFTMGGLYEAVNEVYKNLIPILEAHRDYKKLAAVHGKLQEAFTKIMHQSSGWERVFGTYFRVGFYGAHFGDLDEQEFVYKEPSITKLAEISHRLEEFYTERFGDDVVEIIKDSNPVDKSKLDSQKAYIQITYVEPYFDTYELKDRVTYFDRNYGLRTFLFCTPFTPDGRAHGELPEQHKRKTLLSTDHAFPYIKTRIRVCHREETVLTPVEVAIEDMQKKTRELAFATEQDPPDAKMLQMVLQGSVGPTVNQGPLEVAQVFLAEIPEDPKLFRHHNKLRLCFKDFCKKCEDALRKNKALIGPDQKEYHRELERNYCRLREALQPLLTQRLPQLMAPTPPGLRNSLNRASFRKADL

SEQ ID NO: 3537 - protein, 123 aa, Homo sapiens
MEELTIWEQHTATLSKQLFLPLILSQDPRRGFGIAISGGRDRPGGSMVVSDVVPGGPAEGRLQTGDHIVMVNGVSMENATSAFAIQILKTCTKMANITVKRPRRIHLPATKASPSSPGRQDSD

SEQ ID NO: 3538 - protein, 40 aa, Homo sapiens
MSAGALGALQLPGVLTRLRADLLSYLRHVQWLRRAGGSSL

SEQ ID NO: 3539 - protein, 793 aa, Homo sapiens
MPLPGGLWWLLCCRRGFTLLHRDYGDGELSGDGDEDEDEETFELRTPSPAGGGRGPLEVTLTQPVRSGPVSNRLQSWEETWSLIPEKGLPEDDPDIVVKGWLYREPRGGGARPWLPPRRAWFVLTRDSLDQFSSSGKGARRLGSLVLTSLCSVTGPERRRKETGLWSVTVSGRKHSVRLCSPRQAEAERWGVALREVIASKAPLETPTQLLLRDIQESCGDPEAVALIYLRNPILRHTSGALYAPLLPLPYGVSAPGPGYAPLREEAVRLFLALQALEGARRPGPLMQGVLQTCRDLPALRDELFLQLAKQTSGPAGPPGLPATQDPAALRYWQLLTCMSCTFRPGGAVRGHLLGHLERTEQALPDSELAEYARFIRKALGRTRGRELVPSLAEISALSQRQELLCTVHCPGAGACAVAIDSHTTAGEVARELVGRLGLARSRNAFALYEQRGAQERALAGGTLVADVLTRFENLAAEEAGLEDSPDSGWRLCLRLHGPLHPEGLSPDGHELPFLFEQAHALLLRGRPPPPDDTLRALAALRLQSLQRDFSPRVPLPRLDRLLPPPAPPREDPPRPTPRPPPSAALLAGALWSPGLAKRRAERARRGGAGRTAGSIAREGGGGAGTAAAVLGGWKRLRGMGRAEAMAAYLALAAQCPGFGAARYDVLELSTEPGRGAPQKLCLGLGAKAMSLSRPGETEPIHSVSYGHVAACQLMGPHTLALRVGESQLLLQSPQVEEIMQLVNAYLANPSPERPCSSSSPPCQDLPDTSPPSQRPGLDEPQGQSGCLGQLQD

SEQ ID NO: 3540 - protein, 170 aa, Homo sapiens
MEDERKNGAYGTPQKYDPTFKGPIYNRNKPYLFYFNIVKCASPLVLLEFQCPTPQICVEKCPDRYLTYLNARSSRDFEYYKQFCVPGFKNNKGVAEVLQDGDCPAVLIPSKPLARRCFPAIHAYKGVLMVGNETTYEDGHGSRKNITDLVEGAKKANGVLEARQLAMRIF

SEQ ID NO: 3541 - protein, 160 aa, Homo sapiens
APSAVPGLSKTSGRRVVSHEVVLGGRLAAKTSFSLSRPSSPRVEDLKGAALYSRLREYLLTQDQLKENGYPFPHPERPGGAIIFTAEEKRPKDSSCRTCCRCGTEYLVSSSGRCIRDEECYYHWGRLRRNRVAGGWETQYMCCSAAAGSVGCQVAKGPNQ

SEQ ID NO: 3542 - protein, 1104 aa, Homo sapiens
MSEPHRVQFTSLPGSLNPAFLKKSRKEEAGAGEQHQDCEPAAAAVRITLTLFEPDHKRCPEFFYPELVKNIRGKVKGLQPGDKKKDLSDPFNDEEKERHKVEALARKFEEKYGGKKRRKDRIQDLIDMGYGYDESDSFIDNSEAYDELVPASLTTKYGGFYINSGTLQFRQASESEDDFIKEKKKKSPKKRKLKEGGEKIKKKKKDDTYDKEKKSKKSKFSKAGFTALNASKEKKKKKYSGALSVKEMLKKFQKEKEAQKKREEEHKPVAVPSAEAQGLRELEGASDPLLSLFGSTSDNDLLQAATAMDSLTDLDLEHLLSESPEGSPFRDMDDGSDSLGVGLDQEFRQPSSLPEGLPAPLEKRVKELAQAARAAEGESRQKFFTQDINGILLDIEAQTRELSSQVRSGVYAYLASFLPCSKDALLKRARKLHLYEQGGRLKEPLQKLKEAIGRAMPEQMAKYQDECQAHTQAKVAKMLEEEKDKEQRDRICSDEEEDEEKGGRRIMGPRKKFQWNDEIRELLCQVVKIKLESQDLERNNKAQAWEDCVKGFLDAEVKPLWPKGWMQARTLFKESRRGHGHLTSILAKKKVMAPSKIKVKESSTKPDKKVSVPSGQIGGPIALPSDHQTGGLSIGASSRELPSQASGGLANPPPVNLEDSLDEDLIRNPASSVEAVSKELAALNSRAAGNSEFTLPAPSKAPAEKVGGVLCTEEKRNFAKPSPSAPPPASSLQSPLNFLAEQALALGQSSQEKKPESSGYKELSCQAPLNKGLPEVHQSKAKHHSLPRTSHGPQVAVPVPGPQVKVFHAGTQQQKNFTPPSPFANKLQGPKASPTQCHRSLLQLVKTAAKGQGFHPSAPATSGGLSASSSSSHKTPASSSSALSHPAKPHSVSSAGSSYKNNPFASSISKHGVSSGSSSSGGTPVQSSVSGSLVPGIQPPSVGQATSRPVPSSAGKKMPVSQKLTLVAPPGGPNGDSSGGTQGVAKLLTSPSLKPSAVSSVTSSTSLSKGASGTVLLAGSSLMASPYKSSSPKLSGAMSSNSLGIITPVPIPVHVLSFSADSSAKAGVSKDAIVTGPAPGSFHHGLGHSASQLHGKGPAVPRKL

SEQ ID NO: 3543 - protein, 222 aa, Homo sapiens
MRLLVLLWGCLLLPGYEALEGPEEISGFEGDTVSLQCTYREELRDHRKYWCRKGGILFSRCSGTIYAEEEGQETMKGRVSIRDSRQELSLIVTLWNLTLQDAGEYWCGVEKRGPDESLLISLFVFPGSSRPPMQLDSTSAEDTSPALSSGSSKPRVSIPMVRILAPVLVLLSLLSAAGLIAFCSHLLLWRKEAQQATETQRNEKFCLSRLNSLMFSLSLPWL

SEQ ID NO: 3544 - protein, 589 aa, Homo sapiens
MCSEARLARRLRDALREEEPWAVEELLRCGADPNLVLEDGAAAVHLAAGARHPRGLRCLGALLRQGGDPNARSVEALTPLHVAAAWGCRRGLELLLSQGADPALRDQDGLRPLDLALQQGHLECARVLQDLDTRTRTRTRIGAETQEPEPAPGTPGLSGPTDETLDSIALQKQPCRGDNRDIGLEADPGPPSLPVPLETVDKHGSSASPPGHWDYSSDASFVTAVEVSGAEDPASDTPPWAGSLPPTRQGLLHVVHANQRVPRSQGTEAELNARLQALTLTPPNAAGFQSSPSSMPLLDRSPAHSPPRTPTPGASDCHCLWEHQTSIDSDMATLWLTEDEASSTGGREPVGPCRHLPVSTVSDLELLKGLRALGPEFSGHSLELAAALRTGCIPDVQADEDALAQQFEQPDPARRWREGVVKSSFTYLLLDPRETQDLPARAFSLTPAERLQTFIRAIFYVGKGTRARPYVHLWEALGHHGRSRKQPHQACPKVRQILDIWASGCGVVSLHCFQHVVAVEAYTREACIVEALGIQTLTNQKQGHCYGVVAGWPPARRRRLGVHLLHRALLVFLAEGERQLHPQDIQARG

SEQ ID NO: 3545 - protein, 135 aa, Homo sapiens
MVLAPLPDPGPPSLAVAPEPCPQPLRSPSLDNPTPFPNLGPSENPLKRLLVPGEGCAHVPQGLGRNGPGRGCLLPGEYCGPAHFQQPPTLPHLRPVQGLPAGLGGGHGFPGPWGELSPRSSWCASNPPVPHHLNQ

SEQ ID NO: 3546 - protein, 124 aa, Homo sapiens
MWVPVVFLTLSVTWIGAAPLILSRIVGGWECEKHSQPWQVLVASRGRAVCGGVLVHPQWVLTAAHCIRNKSVILLGRHSLFHPEDTGQVFQVSHSFPHPLYDMSLLKNRFLRPGDDSTLNQRSS

SEQ ID NO: 3547 - protein, 235 aa, Homo sapiens
MTVLAPAWSPTTYLLLLLLLSSGLSGTQDCSFQHSPISSDFAVKIRELSDYLLQDYPVTVASNLQDEELCGGLWRLVLAQRWMERLKTVAGSKMQGLLERVNTEIHFVTKCAFQPPPSCLRFVQTNISRLLQETSEQLVALKPWITRQNFSRCLELQCQPDSSTLPPPWSPRPLEATAPTAPQPPLLLLLLLPVGLLLLAAAWCLHWQRTRRRTPRPGEQVPPVPSPQDLLLVEH

SEQ ID NO: 3548 - protein, 164 aa, Homo sapiens
ILEDATPTATKHGTGRGLPLKDALEYVIPELNIHCLRLALNTPKVTEQLLKLDEQGLCRKHKVGILYCKAGQSSEEEMYNNEEAGPAFEEFLSLIGEKVCLKGFTKYAAQLDVKIETGFHHVGQAGLELLTSDDPPASASQSAGIIGVNHQAWPVYLIFKSRLK

SEQ ID NO: 3549 - protein, 67 aa, Homo sapiens
MFHFISHLRDRIFASWAISGDQSFSLNSEGAERMATTGTPTADRGDAAATDDPAARFQVQKHSWDGL

SEQ ID NO: 3550 - protein, 240 aa, Homo sapiens
MEESVVRPSVFVVDGQTDIPFTRLGRSHRRQSCSVARVGLGLLLLLMGAGLAVQGWFLLQLHWRLGEMVTRLPDGPAGSWEQLIQERRSHEVNPAAHLTGANSSLTGSGGPLLWETQLGLAFLRGLSYHDGALVVTKAGYYYIYSKVQLGGVGCPLGLASTITHGLYKRTPRYPEELELLVSQQSPCGRATSSSRVWWDSSFLGGVVHLEAGEKVVVRVLDERLVRLRDGTRSYFGAFMV

SEQ ID NO: 3551 - protein, 186 aa, Homo sapiens
AVKIRELSDYLLQDYPVTVASNLQDEELCGGLWRLVLAQRWMERLKTVAGSKMQGLLERVNTEIHFVTKCAFQETSEQLVALKPWITRQNFSRCLELQCQPGAPRPQSPGPAACGALTWPRPHPGEDTEAHRGESPARGCIAWTQRKLARGRSLPWAPLIPSPEWRQRQNPAPAPFTQLCTKPLSP

SEQ ID NO: 3552 - protein, 681 aa, Homo sapiens
MGGRVFLVFLAFCVWLTLPGAETQDSRGCARWCPQDSSCVNATACRCNPGFSSFSEIITTPMETCDDINECATLSKVSCGKFSDCWNTEGSYDCVCSPGYEPVSGAKTFKNESENTCQDMTFSTWTPPPGVHSQTLSRFFDKVQDLGRDYKPGLANNTIQSILQALDELLEAPGDLETLPRLQQHCVASHLLDGLEDVLRGLSKNLSNGLLNFSYPAGTELSLEVQKQVDRSVTLRQNQAVMQLDWNQAQKSGDPGPSVVGLVSIPGMGKLLAEAPLVLEPEKQMLLHETHQGLLQDGSPILLSDVISAFLSNNDTQNLSSPVTFTFSHRSVIPRQKVLCVFWEHGQNGCGHWATTGCSTIGTRDTSTICRCTHLSSFAVLMAHYDVQEEDPVLTVITYMGLSVSLLCLLLAALTFLLCKAIQNTSTSLHLQLSLCLFLAHLLFLVAIDQTGHKVLCSIIAGTLHYLYLATLTWMLLEALYLFLTARNLTVVNYSSINRFMKKLMFPVGYGVPAVTVAISAASRPHLYGTPSRCWLQPEKGFIWGFLGPVCAIFSVNLVLFLVTLWILKNRLSSLNSEVSTLRNTRMLAFKATAQLFILGCTWCLGILQVGPAARVMAYLFTIINSLQGVFIFLVYCLLSQQVREQYGKWSKGIRKLKTESEMHTLSSSAKADTSKPSTVN

SEQ ID NO: 3553 - protein, 133 aa, Homo sapiens
MAPPPPPLAASTPLLHGEFGSYPARGPRFALTLTSQALHIQRLRPKPEARPRGGLVPLAEVSGCCTLRSRSPSDSAAYFCIYTYPRGRRGARRRATRTFRADGAATYEENRAEAQRWATALTCLLRGLPLPGD

SEQ ID NO: 3554 - protein, 278 aa, Homo sapiens
RAAPARYLGEVTGPATWSAREKRQLVRLLQARQGQPEPDATELARELRGRSEAEIRVFLQQLKGRVAREAIQKVHPGGLQGPRRREAQPPAPIEVWTDLAEKITGPLEEALAVAFSQVLTIAATEPVTLLHSKPPKPTQARGKPLLLSAPGGQEDPAPEIPSSAPAAPSSAPRTPDPAPEKPSESSAGPSTEEDFAVDFEKIYKYLSSVSRSGRSPELSAAGEKGEGGGRSRGIKGPWQQAGVSPYPSPPSITRVRCGPRPAHVTSRGAATPALHSPG

SEQ ID NO: 3555 - protein, 129 aa, Homo sapiens
MLENWTRTSLEKQEQPHEDPERKGSLSNLMDFVKKTGICASKWEWGTTHNFLYKHGGIRDKIMSSRKHLHLVDAGLAINTPFPLVLPPTREVHLILSFDFSAGDPFEHPRSATSNELLCMSVSSAVKLG

SEQ ID NO: 3556 - protein, 289 aa, Homo sapiens
MAPACQILRWALALGLGLMFEVTHAFRSQDEFLSSLESYEIAFPTRVDHNGALLAFSPPPPRRQRRGTGATAESRLFYKVASPSTHFLLNLTRSSRLLAGHVSVEYWTREGLAWQRAARPHCLYAGHLQGQASSSHVAISTCGGLHGLIVADEEEYLIEPLHGGPKGSRSPEESGPHVVYKRSSLRHPHLDTACGVRDEKPWKGRPWWLRTLKPPPARPLGNETERGQPGLKRSVSRERYVETLVVADKMMVAYHGRRDVEQYVLAIMNIVRLPNFSRTRVWEAPLTSS

SEQ ID NO: 3557 - protein, 329 aa, Homo sapiens
FKNESENTCQDVDECQQNPRLCKSYGTCVNTLGSYTCQCLPGFKLKPEDPKLCTDVDECSSGQHQCDSSTVCFNTVGSYSCRCRPGWKPRHGIPNNQKDTVCEDMTFSTWTPPPGVHSQTLSRFFDKVQDLGRDYKPGLANNTIQSILQALDELLEAPGDLETLPRLQQHCVASHLLDGLEDVLRGLSKNLSNGLLNFSYPAGTELSLEVQKQVDRSVTLRQNQAVMQLDWNQAQKSGDPVSDPETEGALCLLGAWPEWMWSLGHHRLQHNRHQRHQHHLPLHPPEQLCRPHGPLRCAGGGSRADCHHLHGAERLSAVPPPGGPHFSPV

SEQ ID NO: 3558 - protein, 82 aa, Homo sapiens
MAEVHVIGQIIGASGFSESSLFCKWGIHTETGSRYVAQAGLELLRSNRPPTSASQSARIKNGRHGSSCQACGRAKRKWTPRR

SEQ ID NO: 3559 - protein, 909 aa, Homo sapiens
NQYRRSKDSRGRGLSRGRGRGSRGRGKGMGRGRGRGGSRGGMNKGGMNDDEDFYDEDMGDGGGGSYRSRDHDKPHQQSDKKGKVICKYFVEGRCTWGDHCNFSHDIELPKKRELCKFYITGFCARAENCPYMHGDFPCKLYHTTGNCINGDDCMFSHDPLTEETRELLDKMLADDAEAGAEDEKEVEELKKQGINPLPKPPPGVGLLPTPPRPPGPQAPTSPNGRPMQGGPPPPPPPPPPPPGPPQMPMPVHEPLSPQQLQQQDMYNKKIPSLFEIVVRPTGQLAEKLGVRFPGPGGPPGPMGPGPNMGPPGPMGGPMHPDMHPDMHPDMHPDMHADMHADMPMGPGMNPGPPMGPGGPPMMPYGPGDSPHSGMMPPIPPAQNFYENFYQQQEGMEMEPGLLGDAGDTGNWYSSDEDEGGSSVTSILKTLRQQTSSRPPASVGELSSSGLGDPRLQKGHPTGSRLADPRLSRDPRLTRHVEASGGSGPGDSGPSDPRLARALPTSKPEGSLHSSPVGPSSSKGSGPPPTEEEEGERALREKAVNIPLDPLPGHPLRDPRSQLQQFSHIKKDVTLSKPSFARTVLWNPEDLIPLPIPKQDAVPPVPAALQSMPTLDPRLHRAATAGPPNARQRPGASTDSSTQGANLPDFELLSRILKTVNATGSSAAPGSSDKPSDPRVRKAPTDPRLQKPTDSTASSRAAKPGPAEAPSPTASPSGDASPPATAPYDPRVLAAGGLGQGGGGGQSSVLSGISLYDPRTPNAGGKATEPAADTGAQPKGAEGNGKSSASKAKEPPFVRKSALEQPETGKAGADGGTPTDRYNSYNRPRPKAAAAPAATTATPPPEGAPPQPGVHNLPVPTLFGTVKQTPKTGSGSPFAGNSPAREGEQDAASLKDVFKGFDPTASPFCQ

SEQ ID NO: 3560 - protein, 1849 aa, Homo sapiens
MPRSPTSSEDEMAQSFSDYSVGSESDSSKEETIYDTIRATAEKPGGARTEESQGNTLVIRVVIHDLQQTKCIRFNPDATVWVAKQRILCTLTQSLKDVLNYGLFQPASNGRDGKFLDEERLLREYPQPVGEGVPSLEFRYKKRVYKQASLDEKQLAKLHTKTNLKKCMDHIQHRLVEKITKMLDRGLDPNFHDPETGETPLTLAAQLDDSVEVIKALKNGGAHLDFRAKDGMTALHKAARARNQVALKTLLELGASPDYKDSYGLTPLYHTAIVGGDPYCCELLLHEHATVCCKDENGWHEIHQACRYGHVQHLEHLLFYGADMSAQNASGNTALHICALYNQDSCARVLLFRGGNKELKNYNSQTPFQVAIIAGNFELAEYIKNHKETDIVPFREAPAYSNRRRRPPNTLAAPRVLLRSNSDNNLNASAPDWAVCSTATSHRSLSPQLLQQMPSKPEGAAKTIGSYVPGPRSRSPSLNRLGGAGEDGKRPQPLWHVGSPFALGANKDSLSAFEYPGPKRKLYSAVPGRLFVAVKPYQPQVDGEIPLHRGDRVKVLSIGEGGFWEGSARGHIGWFPAECVEEVQCKPRDSQAETRADRSKKLFRHYTVGSYDSFDTSSDCIIEEKTVVLQKKDNEGFGFVLRGAKADTPIEEFTPTPAFPALQYLESVDEGGVAWQAGLRTGDFLIEVNNENVVKVGHRQVVNMIRQGGNHLVLKVVTVTRNLDPDDTARKKAPPPPKRAPTTALTLRSKSMTSELEELVDKASVRKKKDKPEEIVPASKPSRAAENMAVEPRVATIKQRPSSRCFPAGSDMNSVYERQGIAVMTPTVPGSPKAPFLGIPRGTMRRQKSIDSRIFLSGITEEERQFLAPPMLKFTRSLSMPDTSEDIPPPPQSVPPSPPPPSPTTYNCPKSPTPRVYGTIKPAFNQNSAAKVSPATRSDTVATMMREKGMYFRRELDRYSLDSEDLYSRNAGPQANFRNKRGQMPENPYSEVGKIASKAVYVPAKPARRKGMLVKQSNVEDSPEKTCSIPIPTIIVKEPSTSSSGKSSQGSSMEIDPQAPEPPSQLRPDESLTVSSPFAAAIAGAVRDREKRLEARRNSPAFLSTDLGDEDVGLGPPAPRTRPSMFPEEGDFADEDSAEQLSSPMPSATPREPENHFVGGAEASAPGEAGRPLNSTSKAQGPESSPAVPSASSGTAGPGNYVHPLTGRLLDPSSPLALALSARDRAMKESQQGPKGEAPKADLNKPLYIDTKMRPSLDAGFPTVTRQNTRGPLRRQETENKYETDLGRDRKGDDKKNMLIDIMDTSQQKSAGLLMVHTVDATKLDNALQEEDEKAEVEMKPDSSPSEVPEGVSETEGALQISAAPEPTTVPGRTIVAVGSMEEAVILPFRIPPPPLASVDLDEDFIFTEPLPPPLEFANSFDIPDDRAASVPALSDLVKQKKSDTPQSPSLNSSQPTNSADSKKPASLSNCLPASFLPPPESFDAVADSGIEEVDSRSSSDHHLETTSTISTVSSISTLSSEGGENVDTCTVYADGQAFMVDKPPVPPKPKMKPIIHKSNALYQDALVEEDVDSFVIPPPAPPPPPGSAQPGMAKVLQPRTSKLWGDVTEIKSPILSGPKANVISELNSILQQMNREKLAKPGEGLDSPMGAKSASLAPRSPEIMSTISGTRSTTVTFTVRPGTSQPITLQSRPPDYESRTSGTRRAPSPVVSPTEMNKETLPAPLSAATASPSPALSDVFSLPSQPPSGDLFGLNPAGRSRSPSPSILQQPISNKPFTTKPVHLWTKPDVADWLESLNLGEHKEAFMDNEIDGSHLPNLQKEDLIDLGVTRVGHRMNIERALKQLLDR

SEQ ID NO: 3561 - protein, 206 aa, Homo sapiens
MARGGWRRLRRLLSAGQLLFQGRALLVTNTLGCGALMAAGDGVRQSWEIRARPGQVFDPRRSASMFAVGCSMGPFLHYWYLSLDRLFPASGLRGFPNVLKKVLVDQLVASPLLGVWYFLGLGCLEGQTVGESCQELREKFWEFYKADWCVWPAAQFVNFLFVPPQFRVTYINGLTLGWDTYLSYLKYRSPVPLTPPGCVALDTRAD

SEQ ID NO: 3562 - protein, 217 aa, Homo sapiens
MTVLAPAWSPTTYLLLLLLLSSGLSGTQDCSFQHSPISSDFAVKIRELSDYLLQDYPVTVASNLQDEELCGGLWRLVLAQRWMERLKTVAGSKMQGLLERVNTEIHFVTKCAFQETSEQLVALKPWITRQNFSRCLELQCQPDSSTLPPPWSPRPLEATAPTAPQPPLLLLLLLPVGLLLLAAAWCLHWQRTRRRTPRPGEQVPPVPSPQDLLLVEH

SEQ ID NO: 3563 - protein, 595 aa, Homo sapiens
MNGHLEAEEQQDQALHIQRLRPKPEARPRGGLVPLAEVSGCCTLRSRSPSDSAAYFCIYTYPRGRRGARRRATRTFRADGAATYEENRAEAQRWATALTCLLRGLPLPGDGEITPDLLPRPPRLLLLVNPFGGRGLAWQWCKNHVLPMISEAGLSFNLIQTERQNHARELVQGLSLSEWDGIVTVSGDGLLHEVLNGLLDRPDWEEAVKMPVGILPCGSGNALAGAVNQHGGFEPALGLDLLLNCSLLLCRGGGHPLDLLSVTLASGSRCFSFLSVAWGFVSDVDIQSERFRALGSARFTLGTVLGLATLHTYRGRLSYLPATVEPASPTPAHSLPRAKSELTLTPDPAPPMAHSPLHRSVSDLPLPLPQPALASPGSPEPLPILSLNGGGPELAGDWGGAGDAPLSPDPLLSSPPGSPKAALHSPVSEGAPVIPPSSGLPLPTPDARVGASTCGPPDHLLPPLGTPLPPDWVTLEGDFVLMLAISPSHLGADLVAAPHARFDDGLVHLCWVRSGISRAALLRLFLAMERGSHFSLGCPQLGYAAARAFRLEPLTPRGVLTVDGEQVEYGPLQAQMHPGIGTLLTGPPGCPGREP

SEQ ID NO: 3564 - protein, 96 aa, Homo sapiens
MSGAPTAGAALMLCAATAVLLSAQGGPVQSKSPRFASWDEMNVLAHGLLQLGQGLREHAERTRSQLSALERRLSACGSACQGTEGSTDLPLAPESR

SEQ ID NO: 3565 - protein, 408 aa, Homo sapiens
MGTPKPRILPWLVSQLDLGQLEGVAWVNKSRTRFRIPWKHGLRQDAQQEDFGIFQAWAEATGAYVPGRDKPDLPTWKRNFRSALNRKEGLRLAEDRSKDPHDPHKIYEFVNSGVGDFSQPDTSPDTNGGGSTSDTQEDILDELLGNMVLAPLPDPGPPSLAVAPEPCPQPLRSPSLDNPTPFPNLGPSENPLKRLLVPGEEWEFEVTAFYRGRQVFQQTISCPEGLRLVGSEVGDRTLPGWPVTLPDPGMSLTDRGVMSYVRHVLSCLGGGLALWRAGQWLWAQRLGHCHTYWAVSEELLPNSGHGPDGEVPKDKEGGVFDLGPFIVGCAHVPQGLGRNGPGRGCLLPGEYCGPAHFQQPPTLPHLRPVQGLPAGLGGGHGFPGPWGELSPRSSWCASNPPVPHHLNQ

SEQ ID NO: 3566 - protein, 329 aa, Homo sapiens
MGTPKPRILPWLVSQLDLGQLEGVAWVNKSRTRFRIPWKHGLRQDAQQEDFGIFQAWAEATGAYVPGRDKPDLPTWKRNFRSALNRKEGLRLAEDRSKDPHDPHKIYEFVNSGVGDFSQPDTSPDTNGGGSTSDTQEDILDELLGNMVLAPLPDPGPPSLAVAPEPCPQPLRSPSLDNPTPFPNLGPSENPLKRLLVPGEEWEFEVTAFYRGRQVFQQTISCPEGLRLVGSEVGDRTLPGWPVTLPDPGMSLTDRGVMSYVRHVLSCLGGGLALWRAGQWLWAQRLGHCHTYWAVSEELLPNSGHGPDGEVPKDKEGGVFDLGPFIVGE

SEQ ID NO: 3567 - protein, 3266 aa, Homo sapiens
MPAPVGLLGLVLLWPLMAVTAEKIPDSQVGQVASCMTACTGSAGPHLPVGTRYTYHFSTNTSTSLQDVLVEGSGLGLQGLAVLDVLGLCQMALWLQDFQVTSILGAKVELLKESESLSATLGRNPLRFILHSGRVAHLCPHPTEPRWVLNVKRAVLSLLQGHPGAHSPKTFDEVDILGRCPTTYQHHGDWLHKTKDLARCSLRRGRSSLHSQALPGVAPGLTSRLTCVQSFRAGVLREASCTELDSAGPLPAKASAVQMRTLSSLSLLHEMPQDPAGTDPDDRDDEDMTPSSLLYEWEETPSQAMVATAATLVRRLCLAQTTSLEAMDLFLTLVSQLQGLSGGELMELWQYSSFKCRDNGQPLLDALPSCGTEHCVGLMKELIASAAVEADEVEAWLSSLAFLPQPTDAMVHMLLPLLQTPRASPGAFLGISALVHNLCASLDGPCGQLPGVGSLVRILGDALGENCTIQEPSDDDKLQLVLKAVGNAGLAAMALTPTLSACASLRSSTPEIRLGAIQAFRRVPCSADRSVLSRLYQSLEEDAEIRINAYLALMRCPSEEVFAQVRRTQAGELSTQVGSFVWSHILQLLETHDPLKRALRDTLPEDILSQEFHPEMWKHSSYSDVTFRSVSGSLGANLEGTLLFSPASFLPRSATVNLTIHTMGRAFNLLELGLRLENAEEIAHRLFGRKSFWGQEDGREPEPEEPPGPEPGPAPQPASPECPGDRDRRMRYLQQKVTRRRGARQALRCELSVKLLGQELSFVNCGATGSHVNHWPLNLAELAIKLMKGQEVQMNRRLSLAAQELVFPTVSGLPARLTLNASAAISIRVRGTTDFQQRSDFSVNGYVKPSALLQISAQMGTAGILGQAGLRWVTSVRSAASLDGGIQVQKGRVLKVHLNTPEEAVELLSFSSQLYLITRDGVRSLRHVPGPSEVQSCTGEEVSYTWGWRLCTGVTWPVPGQPYLLSLPVFAAVTLQKRDPGLRQYLLEAAYTLQPQKGSWFPQEATAHVFMGTPGSEVLRDVGVDMSYSLPQNKFRLKLLHPKKKIELDGKMEALGSAHTGHLELVLDDRDVYYIKGWSDLQPAMGGEAERFQAQLEVKLVTGGSPVVFTGNLTRQVGSKLAFSASLSHLLSDQANVTALLERKEENGRRVAALGAELFVPGLVGLRALGLLQQRGQLWTNSLRIQYSLLGQAKQAAHECSTSQKLRADSGSDGAYRLELRHELHCTQILAFSHKVQLWHEEDSGHLHSQLEVSYGKHWDKNSNKRHLRVSQTFKNDSGPALSNHFMEFVLQVPERQVDCRVQLYHLSLRLPYVESSSHLKVQYNGRPLFVAGGQWKDTSRATLWKWEGALNLDSPWLMVSAAHRLYWPHRAVFQAVLELTLGKAWTLKDLVVSVGCRSQGPNREGKIQVYTAATTYLRVSTVTVLAQSLFHSWSELESAWNAAVQGEIHAENSRDRKILNCWLKGPQQELNLTAAYRHLEWPRKTQVSLTAVRIGAQGQPRGLQLEGELEELRQDRTLYRKRGALLLRHPLHLPIPQSLLLQETFTADRRHQRYSLETRVVLNGREETLQTMVLGCQAGHPYVCAGLMHPYDGKVIPRNTEGCLVTWNQHTAKNREVEATLKVHRKVVLHLKGLHHDRSQHGEIRHSLALDLAHSYQLSFPQALSLDGGIIFRQSPQGTFNFGMDARAAVNHNVTSQASVQLNGSDSDFAFFFQLRHPHGPTFPPNFQVQAAAGRYRVRSLNGSLSVQMSGRELVLLEVDASQDTRRSSRGWGVSVLLHQAVLSAPRAVRLQLSAKITPARIWLFSKALLDQNTAQLLLKASEEWRGGRILTFQSQTRHTVAGWAAMPRLLTLTGRLKQKETLQEGTLSVTADSAVLGFLLRDQHEKAGNGTSVRSVTCVLAQNSSQALPGELQLKGRLQAQTRNLRAQASIRAHAASLALGGACSWGPRHGQLAGGPTHNISTLSDAGLPSEAGMLLSLTHVASNCSARLALWNAGAQLDGAIGLEDVTPESSGLQLHASLRHTHTMPSLKHWGLPFSLDGHGHFQVNCSGDASPTQLLGWCRGDIAGQPLEVSVDIHNGSSGFEHSGRILMGPTFLNYSVSCYYHDGHLELSGRSWHNSEALLWAGFPGEACLSAELQIHETQTQARVALHGGDSGVSMDLAALVARPRRGPLQLVASASHTVPALQRLGLPFTNQLVFQGLWEAEEMSSSLQLTCDSQATLVLDVRGQNQAVSKELLFSGRHRLPFLLGLCPSSASASAKLHYSKGEVQSMFALGVEERHFHISTRQVAAKAGLNNFIKLEQTFLQLSALPRELFLQTAYERAHGTRVLRQVVLWDGQEVALTGSLSGPFPKPTRNLSLQVELTHPLPLPLPRHCSLRLSSEHLGGSHRDGLVVGWDGRDQVLVSSSLWLGKSELAARLALAHPFNLPWRQAEASGLAESRGGRQSRQVQLTWNRGQPATLQLTWADGSLAHSTAWDGCLAASPGQLQETWGLNSLQACGAFTQTPAVFVEQLNVSWGQHRMRQNLTYERHWPSQPDKIIMEATLEHVLGASCTRQSFWGEVQTDYARWLRHSLHLGLCDLPRALLVVGEHTLGQGGLLLRSRCHLGLAPDPDHGLHLSLTLQNHSRPRSADFSGALELRGSKAQRVGLLGRVSTSTSQSLVRLEGSVDNREEKVRLSVFRAPSCLQASVAHEEGGREESVVLRACAHGRTAEAEVLFRDGRQPSQPLGRLTLQAANQSLLLAARGCQGGLLGHVESRIAAVGSQVQARLEEKVQGLGASVRRFQQLVQPAGTLDGVAGLLLQLSQAGREAMQASGWAVATLWARSQALTQHLPLYLEWLQVGLEQLREELEWPLATLKDAYLEVTLRPLEEVWRERAEEAMRRLQAWVPGMPGKGGPRPIRAALGAMKGALELAAQQMLSWAEATFSRALKRLCKPLLDLYSLSARNRSVVVMLPLLPAGDEPLDVARVTSYLMEEKLLRPLRELSGANVLAEYYWLRRRLLAGPWEYHALVAGAQHVVTFDGRVWDLSTQCGSILLAQDFAHNTFSLTLSRTGSGLTALFVELNHKTLILYPSLQAYRLYNSSLPGDSCPDLKLHPATTRKDVSRIELASEDGVSVSCDVPTGLCSLTLGLWQHGISAGLLGTNDNEAGNELMLPDGSMARSLEELSLAWQVGGDCRATEKPQQEQACPGQLPACWAFFEGPHSSLRDCFRVVDPTPFLSLCVQVPCGTQELQPACNLAAAYIHLCARGFVPLAPPPQCV

SEQ ID NO: 3568 - protein, 154 aa, Homo sapiens
MVLAPLPDPGPPSLAVAPEPCPQPLRSPSLDNPTPFPNLGPSENPLKRLLVPGEDLITFTEGSGRSPRYALWFCVGESWPQDQPWTKRLVMVKVVPTCLRALVEMARVGGASSLENTVDLHISNSHPLSLTSDQYKAYLQDLVEGMDFQGPGES

SEQ ID NO: 3569 - protein, 172 aa, Homo sapiens
MWVPVVFLTLAVCGGVLVHPQWVLTAAHCIRNKSVILLGRHSLFHPEDTGQVFQVSHSFPHPLYDMSLLKNRFLRPGDDSSHDLMLLRLSEPAELTDAVKVMDLPTQEPALGTTCYASGWGSIEPEEFLTPKKLQCVDLHVISNDVCAQVHPQKVTKFMLCAGRWTGGKSTC

SEQ ID NO: 3570 - protein, 105 aa, Homo sapiens
MTLSPLLLFLPPLLLLLDVPTAAVQASPLQALDFFGNGPPVNYKTGNLYLRGPLKKSNAPLVNVTLYYEALCGGCRAFLIRELFPTWLLVMEILNVTLVPYGNAQ

SEQ ID NO: 3571 - protein, 154 aa, Homo sapiens
MAVKKIAIFGATGQTGLTTLAQAVQAGYEVTVLVRDSSRLPSEGPRPAHVVVGDVLQAADVDKTVAGQDAVIVLLGTRNDLSPTTVMSEGARNIVAAMKAHGVDKVVACTSGGWWDHGGGAELGGTGEAAQGPLKGDAEAIPCYCAFTEHQLCA

SEQ ID NO: 3572 - protein, 125 aa, Homo sapiens
MDFRGLPGNYHKEENQEHQLGNNTLSSHLQIDKMTDNKTGEVLISENVVASIQPAEGSFEGDLKVPRMEEKEALVPIQKATDSFHTELHPRVAFWIIKLPRRRSHQDALEGGHWLSEKRHRLQAI

SEQ ID NO: 3573 - protein, 72 aa, Homo sapiens
MAPPPPPLAASTPLLHGEFGSYPARGPRFALTLTSQALHIQRLRPKPEARPRGGLVPLAEVSGCCTLRSRSP

SEQ ID NO: 3574 - protein, 774 aa, Homo sapiens
MGGRVFLVFLAFCVWLTLPGAETQDSRGCARWCPQDSSCVNATACRCNPGFSSFSEIITTPMETCDDINECATLSKVSCGKFSDCWNTEGSYDCVCSPGYEPVSGAKTFKNESENTCQDVDECQQNPRLCKSYGTCVNTLGSYTCQCLPGFKLKPEDPKLCTDVDECSSGQHQCDSSTVCFNTVGSYSCRCRPGWKPRHGIPNNQKDTVCEDMTFSTWTPPPGVHSQTLSRFFDKVQDLGRDYKPGLANNTIQSILQALDELLEAPGDLETLPRLQQHCVASHLLDGLEDVLRGLSKNLSNGLLNFSYPAGTELSLEVQKQVDRSVTLRQNQAVMQLDWNQAQKSGDPGPSVVGLVSIPGMGKLLAEAPLVLEPEKQMLLHETHQGLLQDGSPILLSDVISAFLSNNDTQNLSSPVTFTFSHRSVIPRQKVLCVFWEHGQNGCGHWATTGCSTIGTRDTSTICRCTHLSSFAVLMAHYDVQEEDPVLTVITYMGLSVSLLCLLLAALTFLLCKAIQNTSTSLHLQLSLCLFLAHLLFLVAIDQTGHKVLCSIIAGTLHYLYLATLTWMLLEALYLFLTARNLTVVNYSSINRFMKKLMFPVGYGVPAVTVAISAASRPHLYGTPSRCWLQPEKGFIWGFLGPVCAIFSVNLVLFLVTLWILKNRLSSLNSEVSTLRNTRMLAFKATAQLFILGCTWCLGILQVGPAARVMAYLFTIINSLQGVFIFLVYCLLSQQVREQYGKWSKGIRKLKTESEMHTLSSSAKADTSKPSTVN

SEQ ID NO: 3575 - protein, 597 aa, Homo sapiens
MCSEARLARRLRDALREEEPWAVEELLRCGADPNLVLEDGAAAVHLAAGARHPRGLRCLGALLRQGGDPNARSVEALTPLHVAAAWGCRRGLELLLSQGADPALRDQDGLRPLDLALQQGHLECARVLQDLDTRTRTRTRIGAETQEPEPAPGTPGLSGPTDETLDSIALQKQPCRGDNRDIGLEADPGPPSLPVPLETVDKHGSSASPPGHWDYSSDASFVTAVEVSGAEDPASDTPPWAGSLPPTRQGLLHVVHANQRVPRSQGTEAELNARLQALTLTPPNAAGFQSSPSSMPLLDRSPAHSPPRTPTPGASDCHCLWEHQTSIDSDMATLWLTEDEASSTGGREPVGPCRHLPVSTVSDLELLKGLRALGPEFSGHSLELAAALRTGCIPDVQADEDALAQQFEQPDPARRWREGVVKSSFTYLLLDPRETQDLPARAFSLTPAERLQTFIRAIFYVGKGTRARPYVHLWEALGHHGRSRKQGSRRSPTRSKGTAMEWWQAGHLLVAGAWGCTCCTVPSLSSWLKASDSFIPRTSRPGAECWGVGHPAWGEMFECSSCPMLTAAPISGFRRGVCVCVCVCVCVCVCLCVCVCV

SEQ ID NO: 3576 - protein, 349 aa, Homo sapiens
MAPPPPPLAASTPLLHGEFGSYPARGPRFALTLTSQALHIQRLRPKPEARPRGGLVPLAEVSGCCTLRSRSPSDSAAYFCIYTYPRGRRGARRRATRTFRADGAATYEENRAEAQRWATALTCLLRGLPLPGDGEITPDLLPRPPRLLLLVNPFGGRGLAWQWCKNHVLPMISEAGLSFNLIQTERQNHARELVQGLSLSEWDGIVTVSGDGLLHEVLNGLLDRPDWEEAVKMPVGILPCGSGNALAGAVNQHGGPREDSDSSTSSSACPLWTTARSCPRAAASMPGSCPLLPQQLALGFSRFIQDRVNGGGGRIGSLTCRGHTQRTLPAPAREGGGSLFLKNINVFIC

SEQ ID NO: 3577 - protein, 218 aa, Homo sapiens
MWVPVVFLTLSVTWIGAAPLILSRIVGGWECEKHSQPWQVLVASRGRAVCGGVLVHPQWVLTAAHCIRKPGDDSSHDLMLLRLSEPAELTDAVKVMDLPTQEPALGTTCYASGWGSIEPEEFLTPKKLQCVDLHVISNDVCAQVHPQKVTKFMLCAGRWTGGKSTCSGDSGGPLVCNGVLQGITSWGSEPCALPERPSLYTKVVHYRKWIKDTIVANP

SEQ ID NO: 3578 - protein, 255 aa, Homo sapiens
MAPPPPPLAASTPLLHGEFGSYPARGPRFALTLTSQALHIQRLRPKPEARPRGGLVPLAEVSGCCTLRSRSPSDSAAYFCIYTYPRGRRGARRRATRTFRADGAATYEENRAEAQRWATALTCLLRGLPLPGDGEITPDLLPRPPRLLLLVNPFGGRGLAWQWCKNHVLPMISEAGLSFNLIQTERQNHARELVQGLSLSEWDGIVTVSGDGLLHEVLNGLLDRPDWEEAVKMPVGILPCGSGNALAGAVNQHGG

SEQ ID NO: 3579 - protein, 618 aa, Homo sapiens
MAPPPPPLAASTPLLHGEFGSYPARGPRFALTLTSQALHIQRLRPKPEARPRGGLVPLAEVSGCCTLRSRSPSDSAAYFCIYTYPRGRRGARRRATRTFRADGAATYEENRAEAQRWATALTCLLRGLPLPGDGEITPDLLPRPPRLLLLVNPFGGRGLAWQWCKNHVLPMISEAGLSFNLIQTERQNHARELVQGLSLSEWDGIVTVSGDGLLHEVLNGLLDRPDWEEAVKMPVGILPCGSGNALAGAVNQHGGFEPALGLDLLLNCSLLLCRGGGHPLDLLSVTLASGSRCFSFLSVAWGFVSDVDIQSERFRALGSARFTLGTVLGLATLHTYRGRLSYLPATVEPASPTPAHSLPRAKSELTLTPDPAPPMAHSPLHRSVSDLPLPLPQPALASPGSPEPLPILSLNGGGPELAGDWGGAGDAPLSPDPLLSSPPGSPKAALHSPVSEGAPVIPPSSGLPLPTPDARVGASTCGPPDHLLPPLGTPLPPDWVTLEGDFVLMLAISPSHLGADLVAAPHARFDDGLVHLCWVRSGISRAALLRLFLAMERGSHFSLGCPQLGYAAARAFRLEPLTPRGVLTVDGEQVEYGPLQAQMHPGIGTLLTGPPGCPGREP

SEQ ID NO: 3580 - protein, 831 aa, Homo sapiens
MGGRVFLVFLAFCVWLTLPGAETQDSRGCARWCPQDSSCVNATACRCNPGFSSFSEIITTPMETCDDINECATLSKVSCGKFSDCWNTEGSYDCVCSPGYEPVSGAKTFKNESENTCQDVDECQQNPRLCKSYGTCVNTLGSYTCQCLPGFKLKPEDPKLCTDVNECTSGQNPCHSSTHCLNNVGSYQCRCRPGWQPIPGSPNGPNNTVCEDVDECSSGQHQCDSSTVCFNTVGSYSCRCRPGWKPRHGIPNNQKDTVCEDMTFSTWTPPPGVHSQTLSRFFDKVQDLGRDYKPGLANNTIQSILQALDELLEAPGDLETLPRLQQHCVASHLLDGLEDVLRGLSKNLSNGLLNFSYPAGTELSLEVQKQVDRSVTLRQNQAVMQLDWNQAQKSGDPGMGKLLAEAPLVLEPEKQMLLHETHQGLLQDGSPILLSDVISAFLSNNDTQNLSSPVTFTFSHRSVIPRQKVLCVFWEHGQNGCGHWATTGCSTIGTRDTSTICRCTHLSSFAVLMAHYDVQEEDPVLTVITYMGLSVSLLCLLLAALTFLLCKAIQNTSTSLHLQLSLCLFLAHLLFLVAIDQTGHKVLCSIIAGTLHYLYLATLTWMLLEALYLFLTARNLTVVNYSSINRFMKKLMFPVGYGVPAVTVAISAASRPHLYGTPSRCWLQPEKGFIWGFLGPVCAIFSVNLVLFLVTLWILKNRLSSLNSEVSTLRNTRMLAFKATAQLFILGCTWCLGILQVGPAARVMAYLFTIINSLQGVFIFLVYCLLSQQVREQYGKWSKGIRKLKTESEMHTLSSSAKADTSKPSTPGTVVQACNASTLGGQSRKIT

SEQ ID NO: 3581 - protein, 85 aa, Homo sapiens
MSGAPTAGAALMLCAATAVLLSAQGGPVQSKSPRFASWDEMNVLAHGLLQLGQGLREHAERTRSQLSALERRLSACGSACQGTEG

SEQ ID NO: 3582 - protein, 300 aa, Homo sapiens
MGTPKPRILPWLVSQLDLGQLEGVAWVNKSRTRFRIPWKHGLRQDAQQEDFGIFQAWAEATGAYVPGRDKPDLPTWKRNFRSALNRKEGLRLAEDRSKDPHDPHKIYEFVNSGVGDFSQPDTSPDTNGGGSTSDTQEDILDELLGNMVLAPLPDPGPPSLAVAPEPCPQPLRSPSLDNPTPFPNLGPSENPLKRLLVPGEDLITFTEGSGRSPRYALWFCVGESWPQDQPWTKRLVMVKVVPTCLRALVEMARVGGASSLENTVDLHISNSHPLSLTSDQYKAYLQDLVEGMDFQGPGES

SEQ ID NO: 3583 - protein, 2157 aa, Homo sapiens
MSVKEAGSSGRREQAAYHLHIYPQLSTTESQASCRVTATKDSTTSDVIKDAIASLRLDGTKCYVLVEVKESGGEEWVLDANDSPVHRVLLWPRRAQDEHPQEDGYYFLLQERNADGTIKYVHMQLVAQATATRRLVERGLLPRQQADFDDLCNLPELTEGNLLKNLKHRFLQQKIYTYAGSILVAINPFKFLPIYNPKYVKMYENQQLGKLEPHVFALADVAYYTMLRKRVNQCIVISGESGSGKTQSTNFLIHCLTALSQKGYASGVERTILGAGPVLEAFGNAKTAHNNNSSRFGKFIQVSYLESGIVRGAVVEKYLLEKSRLVSQEKDERNYHVFYYLLLGVSEEERQEFQLKQPEDYFYLNQHNLKIEDGEDLKHDFERLKQAMEMVGFLPATKKQIFAVLSAILYLGNVTYKKRATGREEGLEVGPPEVLDTLSQLLKVKREILVEVLTKRKTVTVNDKLILPYSLSEAITARDSMAKSLYSALFDWIVLRINHALLNKKDVEEAVSCLSIGVLDIFGFEDFERNSFEQFCINYANEQLQYYFNQHIFKLEQEEYQGEGITWHNIGYTDNVGCIHLISKKPTGLFYLLDEESNFPHATSQTLLAKFKQQHEDNKYFLGTPVMEPAFIIQHFAGKVKYQIKDFREKNMDYMRPDIVALLRGSDSSYVRELIGMDPVAVFRWAVLRAAIRAMAVLREAGRLRAERAEKAAGMSSPGAQSHPEELPRGASTPSEKLYRDLHNQMIKSIKGLPWQGEDPRSLLQSLSRLQKPRAFILKSKGIKQKQIIPKNLLDSKSLKLIISMTLHDRTTKSLLHLHKKKKPPSISAQFQTSLNKLLEALGKAEPFFIRCIRSNAEKKELCFDDELVLQQLRYTGMLETVRIRRSGYSAKYTFQDFTEQFQVLLPKDAQPCREVISTLLEKMKIDKRNYQIGKTKVFLKETERQALQETLHREVVRKILLLQSWFRMVLERRHFLQMKRAAVTIQACWRSYRVRRALERTQAAVYLQASWRGYWQRKLYRHQKQSIIRLQSLCRGHLQRKSFSQMISEKQKAEEKEREALEAARAGAEEGGQGQAAGGQQVAEQGPEPAEDGGHLASEPEVQPSDRSPLEHSSPEKEAPSPEKTLPPQKTVAAESHEKVPSSREKRESRRQRGLEHVKFQNKHIQSCKEESALREPSRRVTQEQGVSLLEDKKESREDETLLVVETEAENTSQKQPTEQPQAMAVGKVSEETEKTLPSGSPRPGQLERPTSLALDSRVSPPAPGSAPETPEDKSKPCGSPRVQEKPDSPGGSTQIQRYLDAERLASAVELWRGKKLVAAASPSAMLSQSLDLSDRHRATGAALTPTEERRTSFSTSDVSKLLPSLAKAQPAAETTDGERSAKKPAVQKKKPGDASSLPDAGLSPGSQVDSKSTFKRLFLHKTKDKKYSLEGAEELENAVSGHVVLEATTMKKGLEAPSGQQHRHAAGEKRTKEPGGKGKKNRNVKIGKITVSEKWRESVFRQITNANELKYLDEFLLNKINDLRSQKTPIESLFIEATEKFRSNIKTMYSVPNGKIHVGYKDLMENYQIVVSNLATERGQKDTNLVLNLFQSLLDEFTRGYTKNDFEPVKQSKAQKKKRKQERAVQEHNGHVFASYQVSIPQSCEQCLSYIWLMDKALLCSVCKMTCHKKCVHKIQSHCSYTYGRKGEPGVEPGHFGVCVDSLTSDKASVPIVLEKLLEHVEMHGLYTEGLYRKSGAANRTRELRQALQTDPAAVKLENFPIHAITGVLKQWLRELPEPLMTFAQYGDFLRAVELPEKQEQLAAIYAVLEHLPEANHNSLERLIFHLVKVALLEDVNRMSPGALAIIFAPCLLRCPDNSDPLTSMKDVLKITTCVEMLIKEQMRKYKVKMEEISQLEAAESIAFRRLSLLRQNAPWPLKLGFSSPYEGVLNKSPKTRDIQEEELEVLLEEEAAGGDEDREKEILIERIQSIKEEKQDITYRLPELDPRGSDEENLDSETSASTESLLEERAGRGASEGPPAPALPCPGAPTPSPLPTVAAPPRRRPSSFVTVRVKTPRRTPIMPTANIKLPPGLPSHLPRWAPGAREAAAPVRRREPPARRPDQIHSVYITPGADLPVQGALEPLEEDGQPPGAKRRYSDPPTYCLPPASGQTNG

SEQ ID NO: 3584 - protein, 528 aa, Homo sapiens
MDPAGRARGQGATAGGLLLRAAAAAKGLREDLWGAAALPWRSLSRIPKREGLGEEDTAVAGHELLLPNERSFQNAAKSNNLDLMEKLFEKKVNINVVNNMNRTALHFAVGRNHLSAVDFLLKHKARVDVADKHGLTVIHLAAWSGSLEVMLMLVKAGADQRAKNQDGMSALHFATQSNHVRIVEYLIQDLHLKDLNQPDEKGRKPFLLAAERGHVEMIEKLTFLNLHTSEKDKGGNTALHLAAKHGHSPAVQVLLAQWQDINEMNELNISSLQIATRNGHASLVNFLLSENVDLHQKVEPKESPLHLVVINNHITVVNSLLSAQHDIDILNQKQQTPLHVAADRGNVELVETLLKAGCDLKAVDKQGKTALAVASRSNHSLVVGMLIKAERYYAWREEHHESIRDPSTGFTLTFKQDHSLETRHIRTLLWDLAYHQLKANEWQRLARSWNFTDDQIRAIEEQWSGNESFREHGHRALLIWLHGTLMTQGDPAKQLYEELVHAGFPKLAEKTRHFKSKTDSNSKKCVVS

SEQ ID NO: 3585 - protein, 275 aa, Homo sapiens
MPRPRRCEWLPSPLQALRITHPVTLPCPPPPSEPLATMATSKLPVVPGEEENTILMAKERLEALRTAFESGDLPQAASHLQELLASTESIRLEVGVTGESGAGKSSLINALRGLEAEDPGAALTGVMETTMQPSPYPHPQFPDVTLWDLPGAGSPGCPADKYLKQVDFSRYDFFLLVSPRRCGAVETRLAAEILCQGKKFYFVRTKVDEDLAATRTQRPSGFREAAVLQEIRDHCAERLREAGVADPRIFLVSNLSPARYDFPTLVSTWEHDLPS

SEQ ID NO: 3586 - protein, 163 aa, Homo sapiens
MAVKKIAIFGATGQTGLTTLAQAVQAGYEVTVLVRDSSRLPSEGPRPAHVVVGDVLQAADVDKTVAGQDAVIVLLGTRNDLSPTTVMSEGARNIVAAMKAHGVDKVVACTSGDQPLTGAYTVTLDGRGPSRVISKHDLGHFMLRCLTTDEYDGHSTYPSHQYQ

SEQ ID NO: 3587 - protein, 261 aa, Homo sapiens
FLTLSVTWIGAAPLILSRIVGGWECEKHSQPWQVLVASRGRAVCGGVLVHPQWVLTAAHCIRNKSVILLGRHSLFHPEDTGQVFQVSHSFPHPLYDMSLLKNRFLRPGDDSSHDLMLLRLSEPAELTDAVKVMDLPTQEPALGTTCYASGWGSIEPEECTPGPDVLTPKKLQCVDLHVISNDVCAQVHPQKVTKFMLCAGRWTGGKSTCSGDSGGPLVCNGVLQGITSWGSEPCALPERPSLYTKVVHYRKWIKDTIVANP

SEQ ID NO: 3588 - protein, 452 aa, Homo sapiens
MGTPKPRILPWLVSQLDLGQLEGVAWVNKSRTRFRIPWKHGLRQDAQQEDFGIFQAWAEATGAYVPGRDKPDLPTWKRNFRSALNRKEGLRLAEDRSKDPHDPHKIYEFVNSGVGDFSQPDTSPDTNGGGSTSDTQEDILDELLGNMVLAPLPDPGPPSLAVAPEPCPQPLRSPSLDNPTPFPNLGPSENPLKRLLVPGEEWEFEVTAFYRGRQVFQQTISCPEGLRLVGSEVGDRTLPGWPVTLPDPGMSLTDRGVMSYVRHVLSCLGGGLALWRAGQWLWAQRLGHCHTYWAVSEELLPNSGHGPDGEVPKDKEGGVFDLGPFIVGSWAPRSDYLHGRKRTLTTLCPLVLCGGVMAPGPAVDQEARDGQGCAHVPQGLGRNGPGRGCLLPGEYCGPAHFQQPPTLPHLRPVQGLPAGLGGGHGFPGPWGELSPRSSWCASNPPVPHHLNQ

SEQ ID NO: 3589 - protein, 103 aa, Homo sapiens
MVLEAHDAQGDVPVTVTVHDFPGKKLVLSSEKTVLTPATNHMGNVTFTIPANREFKSEKGRNKFVTVQATFGTQVVEKVVLVSLQSGYLFIQTDKTIYTPGST

SEQ ID NO: 3590 - protein, 172 aa, Homo sapiens
MWVPVVFLTLSVTWIAPPLQVLVASRGRAVCGGVLVHPQWVLTAAHCIRNKSVILLGRHSLFHPEDTGQVFQVSHSFPHPLYDMSLLKNRFLRPGDDSSHDLMLLRLSEPAELTDAVKVMDLPTQEPALGTTCYASGWGSIEPEEFLTPKKLQCVDLHVISNDVCAQVHPQK

SEQ ID NO: 3591 - protein, 287 aa, Homo sapiens
MGTPKPRILPWLVSQLDLGQLEGVAWVNKSRTRFRIPWKHGLRQDAQQEDFGIFQAWAEATGAYVPGRDKPDLPTWKRNFRSALNRKEGLRLAEDRSKDPHDPHKIYEFVNSGVGDFSQPDTSPDTNGGGSTSDTQEDILDELLGNMVLAPLPDPGPPSLAVAPEPCPQPLRSPSLDNPTPFPNLGPSENPLKRLLVPGEEWEFEVTAFYRGRQVFQQTISCPEGLRLVGSEVGDRTLPGWPVTLPDPGMSLTDRGVMSYVRHVLSCLGGGLALWRAGQWLWAQRLG

SEQ ID NO: 3592 - protein, 812 aa, Homo sapiens
MGGRVFLVFLAFCVWLTLPGAETQDSRGCARWCPQDSSCVNATACRCNPGFSSFSEIITTPMETCDDINECATLSKVSCGKFSDCWNTEGSYDCVCSPGYEPVSGAKTFKNESENTCQDVDECQQNPRLCKSYGTCVNTLGSYTCQCLPGFKLKPEDPKLCTDVNECTSGQNPCHSSTHCLNNVGSYQCRCRPGWQPIPGSPNGPNNTVCEDVDECSSGQHQCDSSTVCFNTVGSYSCRCRPGWKPRHGIPNNQKDTVCEDMTFSTWTPPPGVHSQTLSRFFDKVQDLGRDYKPGLANNTIQSILQALDELLEAPGDLETLPRLQQHCVASHLLDGLEDVLRGLSKNLSNGLLNFSYPAGTELSLEVQKQVDRSVTLRQNQAVMQLDWNQAQKSGDPGMGKLLAEAPLVLEPEKQMLLHETHQGLLQDGSPILLSDVISAFLSNNDTQNLSSPVTFTFSHRSVIPRQKVLCVFWEHGQNGCGHWATTGCSTIGTRDTSTICRCTHLSSFAVLMAHYDVQEEDPVLTVITYMGLSVSLLCLLLAALTFLLCKAIQNTSTSLHLQLSLCLFLAHLLFLVAIDQTGHKVLCSIIAGTLHYLYLATLTWMLLEALYLFLTARNLTVVNYSSINRFMKKLMFPVGYGVPAVTVAISAASRPHLYGTPSRCWLQPEKGFIWGFLGPVCAIFSVNLVLFLVTLWILKNRLSSLNSEVSTLRNTRMLAFKATAQLFILGCTWCLGILQVGPAARVMAYLFTIINSLQGVFIFLVYCLLSQQVREQYGKWSKGIRKLKTESEMHTLSSSAKADTSKPSTVN

SEQ ID NO: 3593 - protein, 149 aa, Homo sapiens
MPRNEGLVILPRLVWSGTPGLSDPSMSASQSAGITGLGACIAMDTTRYSKWGGSSEEVPGGPWGRWVHWSRRPLFLALAVLVTTVLWAVILSILLSKASTERAALLDGHDLLRTNASKQTAALGALKEEVGDCHSCCSGTQAQLQTTRA

SEQ ID NO: 3594 - protein, 195 aa, Homo sapiens
MWVPVVFLTLSVTWIGAAPLILSRIVGGWECEKHSQPWQVLVASRGRAVCGGVLVHPQWVLTAAHCIRKPGDDSSHDLMLLRLSEPAELTDAVKVMDLPTQEPALGTTCYASGWGSIEPEEFLTPKKLQCVDLHVISNDVCAQVHPQKVTKFMLCAGRWTGGKSTCSWVILITELTMPALPMVLHGSLVPWRGGV

SEQ ID NO: 3595 - protein, 730 aa, Homo sapiens
MGGRVFLVFLAFCVWLTLPGAETQDSRGCARWCPQDSSCVNATACRCNPGFSSFSEIITTPMETCDDINECATLSKVSCGKFSDCWNTEGSYDCVCSPGYEPVSGAKTFKNESENTCQDVDECSSGQHQCDSSTVCFNTVGSYSCRCRPGWKPRHGIPNNQKDTVCEDMTFSTWTPPPGVHSQTLSRFFDKVQDLGRDYKPGLANNTIQSILQALDELLEAPGDLETLPRLQQHCVASHLLDGLEDVLRGLSKNLSNGLLNFSYPAGTELSLEVQKQVDRSVTLRQNQAVMQLDWNQAQKSGDPGPSVVGLVSIPGMGKLLAEAPLVLEPEKQMLLHETHQGLLQDGSPILLSDVISAFLSNNDTQNLSSPVTFTFSHRSVIPRQKVLCVFWEHGQNGCGHWATTGCSTIGTRDTSTICRCTHLSSFAVLMAHYDVQEEDPVLTVITYMGLSVSLLCLLLAALTFLLCKAIQNTSTSLHLQLSLCLFLAHLLFLVAIDQTGHKVLCSIIAGTLHYLYLATLTWMLLEALYLFLTARNLTVVNYSSINRFMKKLMFPVGYGVPAVTVAISAASRPHLYGTPSRCWLQPEKGFIWGFLGPVCAIFSVNLVLFLVTLWILKNRLSSLNSEVSTLRNTRMLAFKATAQLFILGCTWCLGILQVGPAARVMAYLFTIINSLQGVFIFLVYCLLSQQVREQYGKWSKGIRKLKTESEMHTLSSSAKADTSKPSTVN

SEQ ID NO: 3596 - protein, 119 aa, Homo sapiens
FTTGRRGDLATIHGMNRPFLLLMATPLERAQHLQSSRHRRALDTNYCFSSTEKNCCVRQLYIDFRKDLGWKWIHEPKGYHANFCLGPCPYIWSLDTQYSKLNEQNLIQEVPNIWQREVG

SEQ ID NO: 3597 - protein, 145 aa, Homo sapiens
MDFRGLPGNYHKEENQEHQLGNNTLSSHLQIDKMTDNKTGEVLISENVVASIQPAEGSFEGDLKVPRMEEKEALVPIQKATDSFHTELHPRVAFWIIKLPRRRSHQDALEGGHWLSEKRHRLQAIRDGLRKGTHKDVLEEGTESS

SEQ ID NO: 3598 - protein, 128 aa, Homo sapiens
PVQSKSPRFASWDEMNVLAHGLLQLGQGLREHAERTRSQLSALERRLSACGSACQGTEGSTDLPLAPESRVDPEVLHSLQTQLKAQNSRIQQLFHKVAQQQRHLEKQHLRIQHLQSQTGLNGGLSHID

SEQ ID NO: 3599 - protein, 227 aa, Homo sapiens
MWVPVVFLTLSVTWIGAAPLILSRIVGGWECEKHSQPWQVLVASRGRAVCGGVLVHPQWVLTAAHCIRNKSVILLGRHSLFHPEDTGQVFQVSHSFPHPLYDMSLLKNRFLRPGDDSSHDLMLLRLSEPAELTDAVKVMDLPTQEPALGTTCYASGWGSIEPEEFLTPKKLQCVDLHVISNDVCAQVHPQKVTKFMLCAGRWTGGKSTCSVSHPYSQDLEGKGEWGP

SEQ ID NO: 3600 - protein, 2071 aa, Homo sapiens
MSVKEAGSSGRREQAAYHLHIYPQLSTTESQASCRVTATKDSTTSDVIKDAIASLRLDGTKCYVLVEVKESGGEEWVLDANDSPVHRVLLWPRRAQDEHPQEDGYYFLLQERNADGTIKYVHMQLVAQATATRRLVERGLLPRQQADFDDLCNLPELTEGNLLKNLKHRFLQQKIYTYAGSILVAINPFKFLPIYNPKYVKMYENQQLGKLEPHVFALADVAYYTMLRKRVNQCIVISGESGSGKTQSTNFLIHCLTALSQKGYASGVERTILGAGPVLEAFGNAKTAHNNNSSRFGKFIQVSYLESGIVRGAVVEKYLLEKSRLVSQEKDERNYHVFYYLLLGVSEEERQEFQLKQPEDYFYLNQHNLKIEDGEDLKHDFERLKQAMEMVGFLPATKKQIFAVLSAILYLGNVTYKKRATGREEGLEVGPPEVLDTLSQLLKVKREILVEVLTKRKTVTVNDKLILPYSLSEAITARDSMAKSLYSALFDWIVLRINHALLNKKDVEEAVSCLSIGVLDIFGFEDFERNSFEQFCINYANEQLQYYFNQHIFKLEQEEYQGEGITWHNIGYTDNVGCIHLISKKPTGLFYLLDEESNFPHATSQTLLAKFKQQHEDNKYFLGTPVMEPAFIIQHFAGKVKYQIKDFREKNMDYMRPDIVALLRGSDSSYVRELIGMDPVAVFRWAVLRAAIRAMAVLREAGRLRAERAEKAAGMSSPGAQSHPEELPRGASTPSEKLYRDLHNQMIKSIKGLPWQGEDPRSLLQSLSRLQKPRAFILKSKGIKQKQIIPKNLLDSKSLKLIISMTLHDRTTKSLLHLHKKKKPPSISAQFQTSLNKLLEALGKAEPFFIRCIRSNAEKKELCFDDELVLQQLRYTGMLETVRIRRSGYSAKYTFQDFTEQFQVLLPKDAQPCREVISTLLEKMKIDKRNYQIGKTKVFLKETERQALQETLHREVVRKILLLQSWFRMVLERRHFLQMKRAAVTIQACWRSYRVRRALERTQAAVYLQASWRGYWQRKLYRHQKQSIIRLQSLCRGHLQRKSFSQMISEKQKAEEKEREALEAARAGAEEGGQGQAAGGQQVAEQGPEPAEDGGHLASEPEVQPSDRSPLEHSSPEKEAPSPEKTLPPQKTVAAESHEKVPSSREKRESRRQRGLEHVKFQNKHIQSCKEESALREPSRRVTQEQGVSLLEDKKESREDETLLVVETEAENTSQKQPTEQPQAMAVGKVSEETEKTLPSGSPRPGQLERPTSLALDSRVSPPAPGSAPETPEDKSKPCGSPRVQEKPDSPGGSTQIQRYLDAERLASAVELWRGKKLVAAASPSAMLSQSLDLSDRHRATGAALTPTEERRTSFSTSDVSKLLPSLAKAQPAAETTDGERSAKKPAVQKKKPGDASSLPDAGLSPGSQVDSKSTFKRLFLHKTKDKKYSLEGAEELENAVSGHVVLEATTMKKGLEAPSGQQHRHAAGEKRTKEPGGKGKKNRNVKIGKITVSEKWRESVFRQITNANELKYLDEFLLNKINDLRSQKTPIESLFIEATEKFRSNIKTMYSVPNGKIHVGYKDLMENYQIVVSNLATERGQKDTNLVLNLFQSLLDEFTRGYTKNDFEPVKQSKAQKKKRKQERAVQEHNGHVFASYQVSIPQSCEQCLSYIWLMDKALLCSVCKMTCHKKCVHKIQSHCSYTYGRKGEPGVEPGHFGVCVDSLTSDKASVPIVLEKLLEHVEMHGLYTEGLYRKSGAANRTRELRQALQTDPAAVKLENFPIHAITGVLKQWLRELPEPLMTFAQYGDFLRAVELPEKQEQLAAIYAVLEHLPEANHNSLERLIFHLVKVALLEDVNRMSPGALAIIFAPCLLRCPDNSDPLTSMKDVLKITTCVEMLIKEQMRKYKVKMEEISQLEAAESIAFRRLSLLRQNANKSPKTRDIQEEELEVLLEEEAAGGDEDREKEILIERIQSIKEEKEDITYRLPELDPRGSDEENLDSETSASTESLLEERAGRGASEGPPAPALPCPGAPTPSPLPTVAAPPRRRPSSFVTVRVKTPRRTPIMPTANIKLPPGLPSHLPRWAPGA

SEQ ID NO: 3601 - protein, 663 aa, Homo sapiens
MAPPPPPLAASTPLLHGEFGSYPARGPRFALTLTSQALHIQRLRPKPEARPRGGLVPLAEVSGCCTLRSRSPSDSAAYFCIYTYPRGRRGARRRATRTFRADGAATYEENRAEAQRWATALTCLLRGLPLPGDGEITPDLLPRPPRLLLLVNPFGGRGLAWQWCKNHVLPMISEAGLSFNLIQTERQNHARELVQGLSLSEWDGIVTVSGDGLLHEVLNGLLDRPDWEEAVKMPVGILPCGSGNALAGAVNQHGGFEPALGLDLLLNCSLLLCRGGGHPLDLLSVTLASGSRCFSFLSVAWGFVSDVDIQSERFRALGSARFTLGTVLGLATLHTYRGRLSYLPATVEPASPTPAHSLPRAKSELTLTPDPAPPMAHSPLHRSVSDLPLPLPQPALASPGSPEPLPILSLNGGGPELAGDWGGAGDAPLSPDPLLSSPPGSPKAALHSPVSEGAPVIPPSSGLPLPTPDARVGASTCGPPDHLLPPLGTPLPPDWVTLEGDFVLMLAISPSHLGADLVAAPHARFDDGLVHLCWVRSGISRAALLRLFLAMERGSHFSLGCPQLGYAAARAFRLEPLTPRGVLTVDGEQVEYGPLQAQMHPGIARGRTQTPALPAAPALYGRQPGAAHGLQPVCQGAALFFHNSWLWGSQDLFRIVLTEAVGG

SEQ ID NO: 3602 - protein, 182 aa, Homo sapiens
PAPRHVFGLEKSQLLKEAFDKAGPVPKGREDVKRLLKLHKDRFRGDLRWILFCADLPSLIQEGPQCGLVALWMAGTLLSPPSGVPLERLIRVATERGYTAQGEMFSAPATTRTSTMSRVRGRATRHTGRGRLCHLTRHLRNLLPGPSASHRTGTLNCVSLSSPLLSPSFKAHLGAVTCASPS

SEQ ID NO: 3603 - protein, 128 aa, Homo sapiens
MSGAPTAGAALMLCAATAVLLSAQGGPVQSKSPRFASWDEMNVLAHGLLQLGQGLREHAERTRSQLSALERRLSACGSFTACRHNSRLRTAGSSNSSTRWPSSSGTWRSSTCEFSICKASLASWTTST

SEQ ID NO: 3604 - protein, 104 aa, Homo sapiens
MSGAPTAGAALMLCAATAVLLSAQGGPVQSKSPRFASWDEMNVLAHGLLQLGQGLREHAERTRSQLSALERRLSACGSACQGTEGSTDLPLAPESRVDPEVLHS

SEQ ID NO: 3605 - protein, 42 aa, Homo sapiens
TELPHHGKHRPEEGPPGPLGRTAMQVRCATRGFVCICVCVHA

SEQ ID NO: 3606 - protein, 3565 aa, Homo sapiens; identical to SEQ ID NO: 2820

SEQ ID NO: 3607 - protein, 530 aa, Homo sapiens
MGRHVATSCHVAWLLVLISGCWGQVNRLPFFTNHFFDTYLLISEDTPVGSSVTQLLAQDMDNDPLVFGVSGEEASRFFAVEPDTGVVWLRQPLDRETKSEFTVEFSVSDHQGVITRKVNIQVGDVNDNAPTFHNQPYSVRIPENTPVGTPIFIVNATDPDLGAGGSVLYSFQPPSQFFAIDSARGIVTVIRELDYETTQAYQLTVNATDQDKTRPLSTLANLAIIITDVQDMDPIFINLPYSTNIYEHSPPGTTVRIITAIDQDKGRPRGIGYTIVSGNTNSIFALDYISGVLTLNGLLDRENPLYSHGFILTVKGTELNDDRTPSDATVTTTFNILVIDINDNAPEFNSSEYSVAITELAQVGFALPLFIQVVDKDENLGLNSMFEVYLVGNNSHHFIISPTSVQGKADIRIRVAIPLDYETVDRYDFDLFANESVPDHVGYAKVKITLINENDNRPIFSQPLYNISLYENVTVGTSVLTVLVSPRFTAGPLSSPGPTVVRHPEGFCPRDLSNQGRRHPQIPELCLLVY

SEQ ID NO: 3608 - protein, 87 aa, Homo sapiens
MWRPAGVQCLNLGSLQSPPTKIKRFSCLSLPTTWDYRCSSVISTLLCCTAGRSPGRPLLCSSGETSGAFLQGSPAPHPCGGRCSPPR

SEQ ID NO: 3609 - protein, 935 aa, Homo sapiens
MKVTVCFGRTGIVVPCKEGQLRVGELTQQALQRYLKTREKGPGYWVKIHHLEYTDGGILDPDDVLADVVEDKDKLIAVFEEQEPLHKIESPSGNPADRQSPDAFETEVAAQLAAFKPIGGEIEVTPSALKLGTPLLVRRSSDPVPGPPADTQPSASHPGGQSLKLVVPDSTQNLEDREVLNGVQTELLTSPRTKDTLSDMTRTVEISGEGGPLGIHVVPFFSSLSGRILGLFIRGIEDNSRSKREGLFHENECIVKINNVDLVDKTFAQAQDVFRQAMKSPSVLLHVLPPQNREQYEKSVIGSLNIFGNNDGVLKTKVPPPVHGKSGLKTANLTGTDSPETDASASLQQNKSPRVPRLGGKPSSPSLSPLMGFGSNKNAKKIKIDLKKGPEGLGFTVVTRDSSIHGPGPIFVKNILPKGAAIKDGRLQSGDRILEVNGRDVTGRTQEELVAMLRSTKQGETASLVIARQEGHFLPRELKGEPDCCALSLETSEQLTFEIPLNDSGSAGLGVSLKGNKSRETGTDLGIFIKSIIHGGAAFKDGRLRMNDQLIAVNGESLLGKSNHEAMETLRRSMSMEGNIRGMIQLVILRRPERPMEDPAECGAFSKPCFENCQNAVTTSRRNDNSILHPLGTCSPQDKQKGLLLPNDGWAESEVPPSPTPHSALGLGLEDYSHSSGVDSAVYFPDQHINFRSVTPARQPESINLKASKSMDLVPDESKVHSLAGQKSESPSKDFGPTLGLKKSSSLESLQTAVAEVRKNDLPFHRPRPHMVRGRGCNESFRAAIDKSYDGPEEIEADGLSDKSSHSGQGALNCESAPQGNSELEDMENKARKVKKTKEKEKKKEKGKLKVKEKKRKEENEDPERKIKKKGFGAMLRYGPALKAKLVLILSLLKKAHAFPRLQPNAYGSQFCARSLSAEAEELFGESYSDDRTLS

SEQ ID NO: 3610 - protein, 215 aa, Homo sapiens
QFTDLFQRYFCREVRDGRAPGRDYRDTGRGPPAKAEASPEPGPGPAAPGLPKARSSEELAPPRPPGPCSFQHFRRSLRHIFRRRSAGELPAAHTAAAPGTPGEAAETPARPGLAKKFLPWSLAREPPPEALKEAVLRYSLADEASMDSGARWQRGRLALRRAPGPDGPDRVLELFDPPKWPEPELSRLRFRLKQGLSCAHVPTRCNLAGASGIGH

SEQ ID NO: 3611 - protein, 1034 aa, Homo sapiens
DKTRPLSTLANLAIIITDVQDMDPIFINLPYSTNIYEHSPPGTTVRIITAIDQDKGRPRGIGYTIVSGNTNSIFALDYISGVLTLNGLLDRENPLYSHGFILTVKGTELNDDRTPSDATVTTTFNILVIDINDNAPEFNSSEYSVAITELAQVGFALPLFIQVVDKDEENGGWLQGRPEGVGEGLHVQNLGLNSMFEVYLVGNNSHHFIISPTSVQGKADIRIRVAIPLDYETVDRYDFDLFANESVPDHVGYAKVKITLINENDNRPIFSQPLYNISLYENVTVGTSVLTVLATDNDAGTFGEVSYFFSDDPDRFSLDKDTGLIMLIARLDYELIQRFTLTIIARDGGGEETTGRVRINVLDVNDNVPTFQKDAYVGALRENEPSVTQLVRLRATDEDSPPNNQITYSIVSASAFGSYFDISLYEGYGVISVSRPLDYEQISNGLIYLTVMAMDAGNPPLNSTVPVTIEVFDENDNPPTFSKPAYFVSVVENIMAGATVLFLNATDLDRSREYGQESIIYSLEGSTQFRINARSGEITTTSLLDRETKSEYILIVRAVDGGVGHNQKTGIATVNITLLDINDNHPTWKDAPYYINLVEMTPPDSDVTTVVAVDPDLGENGTLVYSIQPPNKFYSLNSTTGKIRTTHAMLDRENPDPHEAELMRKIVVSVTDCGRPPLKATSSATVFVNLLDLNDNDPTFQNLPFVAEVLEGIPAGVSIYQVVAIDLDEGLNGLVSYRMPVGMPRMDFLINSSSGVVVTTTELDRERIAEYQLRVVASDAGTPTKSSTSTLTIHVLDVNDETPTFFPAVYNVSVSEDVPREFRVVWLNCTDNDVGLNAELSYFITGGNVDGKFSVGYRDAVVRTVVGLDRETTAAYMLILEAIDNGPVGKRHTGTATVFVTVLDVNDNRPIFLQSSYEASVPEDIPEGHSILQHPPWPLKGASSIIFNPFLIDPNVGALKRGHQDGCQDHAWRALFAPPPSWHPGICSTRREAAAPTGHQADAGSTRETQGREPRGFAPALGQHRCQDSVLAPV

SEQ ID NO: 3612 - protein, 395 aa, Homo sapiens
MYPESTTGSPARLSLRQTGSPGMIYSTRYGSPKRQLQFYRNLGKSGLRVSCLGLGTWVTFGGQITDEMAEQLMTLAYDNGINLFDTAEVYAAGKAEVVLGNIIKKKGWRRSSLVITTKIFWGGKAETERGLSRKHIIEGLKASLERLQLEYVDVVFANRPDPNTPMEETVRAMTHVINQGMAMYWGTSRWSSMEIMEAYSVARQFNLTPPICEQAEYHMFQREKVEVQLPELFHKIGVGAMTWSPLACGIVSGKYDSGIPPYSRASLKGYQWLKDKILSEEGRRQQAKLKELQAIAERLGCTLPQLAIAWCLRNEGVSSVLLGASNADQLMENIGAIQVRVRGPAGQRAHPSPSPVQCILPGSSCVPGSVLGTQDAPVNHQSCAPGELAFQQEQT

SEQ ID NO: 3613 - protein, 3388 aa, Homo sapiens; identical to SEQ ID NO: 1845

SEQ ID NO: 3614 - protein, 87 aa, Homo sapiens
TKAGLYWGYTVRLASCLSAVFAEAPFQDGYDLTIGTSERGSDVASAQLPNFRKPSSSPWPPCSLASSRRVPGTPESSKGPRTSVKQQ

SEQ ID NO: 3615 - protein, 91 aa, Homo sapiens
MQYSHHCEHLLERLNKQREAGFLCDCTIVIGEFQFKAHRNVLASFSEYFGAIYRSTSENNVFLDQSQVKADGFQKLLEFIYTGTLNLDRDI

SEQ ID NO: 3616 - protein, 495 aa, Homo sapiens
IPNHVNLDQYVGQENLTPQQDSSVFIKPEKLFDVKPGTLEISPHHSFGLPLLYLPLKPPNMFPSTSRASITVPSTPIQPIAEERKYPRLSLLHSHLSPENRCKKTQLIPLENLIAFKQSQQKLTHNLFEQGDAGHLQLLKVKIEPPEVRQGKDSKKRQRRRAEKELQEKRCEKLRRKPNVTFRPENSIINNDDSEIIKKPKEQQEHCGSHPLDDFDVPFEMLQDDNTSAGLHFMASVKKKAIGSQDASTNTDPEHEPLTAPQLLVPDVYLNLKLSSEMSEKPWSPSIPHTVTNLVGHTYINVIDIEANDLLQELPVREEPSNDNVIKQQSDHLAVPSSAELHYMAASVTNAVPPHNFKSQESANSSMDLFSKPAEVTPACLDGKSLRAGITEVKEPSVTSPTPSDIQQNKGLPKPEFRFKGQSTKSDSAEDYLLWKRLQGVSAACPAPSSAAHQLEHLSAKLQKIDEQLLAIQNIAENIEQDFPKPEMLDLHCDK

SEQ ID NO: 3617 - protein, 142 aa, Homo sapiens
MHNILKKYHQYIVECHGITLLPQFLGMYRLNVDGVEIYVIVTRNVFSHRLSVYRKYDLKGSTVAREASDKEKAKELPTLKDNDFINEGQKIYIDDNNKKVFLEKLKKDVEFLAQLKLMDYSLLVGIHDVERAEQEEVECEEN

SEQ ID NO: 3618 - protein, 143 aa, Homo sapiens
MEEPQSDPSVEPPLSQETFSDLWKLLPENNVLSPLPSQAMDDLMLSPDDIEQWFTEDPGPDEAPRMPEAAPPVAPAPAAPTPAAPAPAPSWPLSSSVPSQKTYQGSYGFRLGFLHSGTAKSVTCTMFCQLAKTCPVQLWVDST

SEQ ID NO: 3619 - protein, 70 aa, Homo sapiens
MDEQPRLMHSHAGVGMAGHPGLSQHLQDGAGGTEGEGGRKQDIGDILQQIMTITDQSLDEAQASNYMAEE

SEQ ID NO: 3620 - protein, 450 aa, Homo sapiens
MASAITQCSTSELTCSICTDYLTDPVTICCGHRFCSPCLCLLWEDTLTPNCCPVCREISQQMYFKRIIFAEKQVIPTRESVPCQLSSSAMLICRRHQEIKNLICETDRSLLCFLCSQSPRHATHKHYMTREADEYYRKKLLIQMKSIWKKKQKNQRNLNRETNIIGTWEVFINLRSMMISAEYPKVCQYLREEEQKHVESLAREGRIIFQQLKRSQTRMAKMGILLREMYEKLKEMSCKADVNLPQDLGDVMKRNEFLRLAMPQPVNPQLSAWTITGVSERLNFFRVYITLDRKICSNHKLLFEDLRHLQCSLDDTDMSCNPTSTQYTSSWGAQILSSGKHYWEVDVKDSCNWVIGLCREAWTKRNDMRLDSEGIFLLLCLKVDDHFSLFSTSPLLPHYIPRPQGWLGVFLDYECGIVSFVNVAQSSLICSFLSRIFYFPLRPFICHGSK

SEQ ID NO: 3621 - protein, 456 aa, Homo sapiens
MVVLNPMTLGIYLQLFFLSIVSQPTFINSVLPISAALPSLDQKKRGGHKACCLLTPPPPPLFPPPFFRGGRSPLLSPDMKNLMLELETSQSPCMQGSLGSPGPPGPQGPPGLPGKTGPKGEKGELGRPGRKGRPGPPGVPGMPGPIGWPGPEGPRGEKGDLGMMGLPGSRGPMGSKGYPGSRGEKGSRGEKGDLGPKGEKGFPGFPGMLGQKGEMGPKGEPGIAGHRGPTGRPGKRGKQGQKGDSGVMGPPGKPGPSGQPGRPGPPGPPPAGQLIMGPKGERGFPGPPGRCLCGPTMNVNNPSYGESVYGPSSPRVPVIFVVNNQEELERLNTQNAIAFRRDQRSLYFKDSLGWLPIQLTPFYPVDYTADQHGTCGDGLLQPGEECDDGNSDVGDDCIRDCHRAYCGDGHRHEGVEDCDGSDFGYLTCETYLPGSYGDLQCTQYCYIDSTPCRYFT

SEQ ID NO: 3622 - protein, 535 aa, Homo sapiens
MEEPPQEALAEPLKHESPAAPSSAGHTKGQEEDDQKNQAERKADNHTAHRIADQTALRVPSQAESSIFSQATNGVAEQNGHSTPGQAGRRASNPADVSDLRADDQVNQTPSEQTKGKASSQANNVQHEQSDGQVSGLTEERTAEQTERRLPTQAERRTSGQIDGRLAMPSDQRGSRQTDHRMAGQSERRASEQMDRRMSGEAERRTSEQITHRLSKLSERRPSVQIDSGSSVPSDQSPSVQIDSGSSVPSDQRPSVQIDRRMSGKVRRRSSEKTDYRLAGLADPGTSEQTDLRLYGLVDHKTSVKTHHQVYGQATELAEHQAIDQAHSNADQPPVDNAHYTESDQTDHLADRQANHKDQLSYYETRGQSEDRIFPQLGNSKEDKEADYRVQPCKFEDSQVDLNSKPSVEMETQNATTIPPYNPVDARFTSNFQAKDQALFPRLPSISSKLNYTSSQEKTQAIVTKSDEFSEIDQGKGYHIRNQTYRRFPSIVYEDPYQVSLQYMEKHHILQIFQITENLVYEKPEDPLNFMLCQV

SEQ ID NO: 3623 - protein, 15 aa, Homo sapiens
AESNSADDETDDPRR

SEQ ID NO: 3624 - protein, 579 aa, Homo sapiens
MCDQQQIQCRLPLQQCCVKGPSFCSSQSPFAQSQVVVQAPCEMQIVDCPASCPVQVCQVSDQAPCQSQTTQVKCQSKTKQVKGQAQCQSKTTQVKGQAASQSQTSSVQSQAPCQSEVSYVQCEASQPVQTCFVECAPVCYTETCYVECPVQNYVPCPAPQPVQMYRGRPAVCQPQGRFSTQCQYQGSYSSCGPQFQSRATCNNYTPQFQLRPSYSSCFPQYRSRTSFSPCVPQCQTQGSYGSFTEQHRSRSTSRCLPPPRRLQLFPRSCSPPRRFEPCSSSYLPLRPSEGFPNYCTPPRRSEPIYNSRCPRRPISSCSQRRGPKCRIEISSPCCPRQVPPQRCPVEIPPIRRRSQSCGPQPSWGASCPELRPHVEPRPLPSFCPPRRLDQCPESPLQRCPPPAPRPRLRPEPCISLEPRPRPLPRQLSEPCLYPEPLPALRPTPRPVPLPRPGQCEIPEPRPCLQPCEHPEPCPRPEPIPLPAPCPSPEPCRETWRSPSPCWGPNPVPYPGDLGCHESSPHRLDTEAPYCGPSSYNQGQESGAGCGPGDVFPERRGQDGHGDQGNAFAGVKGEAKSAYF

SEQ ID NO: 3625 - protein, 421 aa, Homo sapiens
MWVPAGEPGSGTGSWSVGDWTTQGMRVAEPGCGQRVARGPWEHLQALFVLFVLAYIHIVFSRSPINCLEHVRDKWPREGILRVEVRHNSSRAPVFLQFCDSGGRGSFPGLAVEPGSNLDMEDEEEEELTMEMFGNSSIKFELDIEPKVFKPPSSTEALNDSQEFPFPETPTKVWPQDEYIVEYSLEYGFLRLSQATRQRLSIPVMVVTLDPTRDQCFGDRFSRLLLDEFLGYDDILMSSVKGLAENEENKGFLRNVVSGEHYRFVSMWMARTSYLAAFAIMVIFTLSVSMLLRYSHHQIFVFIAPLLTVILALVGEDPTRPPPPRAAPRPARFNRRRLSLQGWRPSCRSSSTTPPPPSTSSSSCGSRTSMTPSAATPAPASGIGCGSSISTTSPSMPITTASMGSIAAWPWSPPGSSSSIP

SEQ ID NO: 3626 - protein, 211 aa, Homo sapiens
MAEASSANLGSGCEEKRHEGSSSESVPPGTTISRVKLLDTMVDTFLQKLVAAGSYQRFTDCYKCFYQLQPAMTQQIYDKFIAQLQTSIREEISDIKEEGNLEAVLNALDKIVEEGKVRKEPAWRPSGIPEKDLHSVMAPYFLQQRDTLRRHVQKQEAENQQLADAVLAGRRQVEELQLQVQAQQQAWQVRSPAVQSPAKVQPLCPSRRAAR

SEQ ID NO: 3627 - protein, 334 aa, Homo sapiens
MPQVGGRPLSHLERSQWGMRRTAWSSLPPCPTASHWVSLAKPAASWVPVSFSGPGTAYQREKMFFPVCTFPSHWSRGSGAVSKDRTPSPTRHQAHILVPLKIQLRRVPDSFSQQMPETSYLTRVGPDIQCWPESWGMDSLQKQDLRRPKIHGAVQASPYQPPTLASLQRLLWVRQAATLNHIDEVWPSLFLGDAYAARDKSKLIQLGITHVVNAAAGKFQVDTGAKFYRGMSLEYYGIEADDNPFFDLSVYFLPVARYIRAALSVPQGRVLVHCAMGVSRSATLVLAFLMICENMTLVEAIQTVQAHRNICPNSGFLRQLQVLDNRLGRETGRF

SEQ ID NO: 3628 - protein, 220 aa, Homo sapiens
MPETSYLTRVGPDIQCWPESWGMDSLQKQDLRRPKIHGAVQASPYQPPTLASLQRLLWVRQAATLNHIDEVWPSLFLGDAYAARDKSKLIQLGITHVVNAAAGKFQVDTGAKFYRGMSLEYYGIEADDNPFFDLSVYFLPVARYIRAALSVPQGRVLVHCAMGVSRSATLVLAFLMICENMTLVEAIQTVQAHRNICPNSGFLRQLQVLDNRLGRETGRF

SEQ ID NO: 3629 - protein, 406 aa, Homo sapiens
MSEHVEPAAPGPGPNGGGGGPAPARGPRTPNLNPNPLINVRDRLFHALFFKMAVTYSRLFPPAFRRLFEFFVLLKALFVLFVLAYIHIVFSRSPINCLEHVRDKWPREGILRVEVRHNSSRAPVFLQFCDSGGRGSFPGLAVEPGSNLDMEDEEEEELTMEMFGNSSIKFELDIEPKVFKPPSSTEALNDSQEFPFPETPTKVWPQDEYIVEYSLEYGFLRLSQATRQRLSIPVMVVTLDPTRDQCFGDRFSRLLLDEFLGYDDILMSSVKGLAENEENKGFLRNVVSGEHYRFVSMWMARTSYLAAFAIMVIFTLSVSMLLRYSHHQIFVFIVDLLQMLEMNMAIAFPAAPLLTVILALVGMEAIMSEFFNDTTTAFYIILIVWLADQYDAICCHTSTSKRHWLR

SEQ ID NO: 3630 - protein, 180 aa, Homo sapiens
MRPSVWAAVAAGLWVLCTVIAEGPPALPALALPLAGAPDAGGCQGAEGPLRGRGAELGAAQLLLPPQEGSSAAIVLRSAPPRGPGHRGRPGSAQRPAPLGAAPRRRPDPGAAGGRGEGCGGLPUAGTARLLQEGPRGPEEASQTPESGLASVPQSQRGLQPPAPAHVGAPAGCTLWALPL

SEQ ID NO: 3631 - protein, 505 aa, Homo sapiens
MSNICQRLWEYLEPYLPCLSTEADKSTVIENPGALCSPQSQRHGHYFVALFDYQARTAEDLSFRAGDKLQVLDTLHEGWWFARHLEKRRDGSSQQLQGYIPSNYVAEDRSLQAEPWFFGAIGRSDAEKQLLYSENKTGSFLIRESESQKGEFSLSVLDGAVVKHYRIKRLDEGGFFLTRRRIFSTLNEFVSHYTKTSDGLCVKLGKPCLKIQVPAPFDLSYKTVDQWEIDRNSIQLLKRLGSGQFGEVWEGLWNNTTPVAVKTLKPGSMDPNDFLREAQIMKNLRHPKLIQLYAVCTLEDPIYIITELMRHGSLQEYLQNDTGSKIHLTQQVDMAAQVASGMAYLESRNYIHRDLAARNVLVGEHNIYKVADFGLARVFKVDNEDIYESRHEIKLPVKWTAPEAIRSNKFSIKSDVWSFGILLYEIITYGKMPYSGMTGAQVIQMLAQNYRLPQPSNCPQQFYNIMLECWNAEPKERPTFETLRWKLEDYFETDSSYSDANNFIR

SEQ ID NO: 3632 - protein, 203 aa, Homo sapiens
NSLLGLPSFYRSYFSQFRKINTLESVDVHCFGHLLYEMTYGRPPDSVPVDSFPPAPSMAVVAVLESTLSCEACKNGMPTISRLLQMPLFSDVLLTTSEKPQFKIPTKLKEALRIAKECIEKRLIEEQKQIHQHRRLTRAQSHHGSEEERKKRKILARKKSKRSALENSEEHSAKYSNSNNSAGSGASSPLTSPSSPTPPSTSG

SEQ ID NO: 3633 - protein, 542 aa, Homo sapiens
MVSKLSQLQTELLAALLESGLSKEALIQALGEPGPYLLAGEGPLDKGESCGGGRGELAELPNGLGETRGSEDETDDDGEDFTPPILKELENLSPEEAAHQKAVVETLLQEDPWRVAKMVKSYLQQHNIPQREVVDTTGLNQSHLSQHLNKGTPMKTQKRAALYTWYVRKQREVAQQFTHAGQGGLIEEPTGDELPTKKGRRNRFKWGPASQQILFQAYERQKNPSKEERETLVEECNRAECIQRGVSPSQAQGLGSNLVTEVRVYNWFANRRKEEAFRHKLAMDTYSGPPPGPGPGPALPAHSSPGLPPPALSPSKVHGVRYGQPATSETAEVPSSSGGPLVTVSTPLHQVSPTGLEPSHSLLSTEAKLVSAAGGPLPPVSTLTALHSLEQTSPGLNQQPQNLIMASLPGVMTIGPGEPASLGPTFTNTGASTLVIGLASTQAQSVPVINSMGSSLTTLQPVQFSQPLHPSYQQPLMPPVQSHVTQSPFMATMAQLQSPHGERPVPHTAGDDDRGWLSMDAGERGAWQALQSACVSGTSVFP

SEQ ID NO: 3634 - protein, 126 aa, Homo sapiens
MPRSPTSSEDEMAQSFSDYSVGSESDSSKEETIYDTIRATAEKPGGARTEESQGNTLVIRVVIHDLQQTKCIRFNPDATVWVAKQRILCTLTQSLKDVLNYGLFQPASNGRDGRSFPGVSIQEAGV

SEQ ID NO: 3635 - protein, 506 aa, Homo sapiens
MASGDLYEVERIVDKRKNKKGKWEYLIRWKGYGSTEDTWEPEHHLLHCEEFIDEFNGLHMSKDKRIKSGKQSSTSKLLRDSRGPSVEKLSHRPSDPGKSKGTSHKRKRINPPLAKPKKGYSGKPSSGGDRATKTVSYRTTPSGLQIMPLKKSQNGMENGDAGSEKDERHFGNGSHQPGLDLNDHVGEQDMGECDVNHATLAENGLGSALTNGGLNLHSPVKRKLEAEKDYVFDKRLRYSVRQNESNCRFRDIVVRKEEGFTHILLSSQTSDNNALTPEIMKEVRRALCNAATDDSKLLLLSAVGSVFCSGLDYSYLIGRLSSDRRKESTRIAEAIRDFVKAFIQFKKPIVVAINGPALGLGASILPLCDIVWASEKAWFQTPYATIRLTPAGCSSYTFPQILGVALANEMLFCGRKLTAQEACSRGLVSQVFWPTTFSQEVMLRVKEMASCSAVVLEESKCLVRSFLKSVLEDVNEKECLMLKQLWSSSKGLDSLFSYLQDKIYEV

SEQ ID NO: 3636 - protein, 446 aa, Homo sapiens
MLENYRNLVSLGVSISNPDLVTSLEQRKEPYNLKIHETAARPPAVCSHFTQNLWTVQGIEDSFHKLIPKGHEKRGHENLRKTCKSINECKVQKGGYNRINQCLLTTQKKTIQSNICVKVFHKFSNSNKDKIRYTGDKTFKCKECGKSFHVLSRLTQHKRIHTGENPYTCEECGKAFNWSSILTKHKRIHAREKFYKCEECGKGFTRSSHLTKHKRIHTGEKPYICEKCGKAFNQSSTLNLHKRIHSAQKYYKCEECGKAFKWSSSLNEHKRIHAGEKPFSCEECGNVFTTSSDFAKHKRIHTGEKPYKCEECGKSFNRSTTLTTHKRIHTGEKPYTCEECGKAFNWSSTLNVHKRIHSGKNPYKCEDCGKAFKVFANLHNHKKIHTGEKPYICKQCGKAFKQSSHLNKHKKIHTVDKPYKCKECGKAFKQYSNLPQHKRTHTGGKF

SEQ ID NO: 3637 - protein, 190 aa, Homo sapiens
AAPPKAVLKLEPPWINVLQEDSVTLTCQGARSPESDSIQWFHNGNLIPTHTQPSYRFKANNNDSGEYTCQTGQTSLSDPVHLTVLSEWLVLQTPHLEFQEGETIMLRCHSWKDKPLVKVTFFQNGKSQKFSHLDPTFSIPQANHSHSGDYHCTGNIGYTLFSSKPVTITVQAWAALHQWGSLWLWSLRLL

SEQ ID NO: 3638 - protein, 1153 aa, Homo sapiens
MSLKPQQQQQQQQQQQQQQQQQQQQQQQPPPAAANVRKPGGSGLLASPAAAPSPSSSSVSSSSATAPSSVVAATSGGGRPGLGRGRNSNKGLPQSTISFDGIYANMRMVHILTSVVGSKCEVQVKNGGIYEGVFKTYSPKCDLVLDAAHEKSTESSSGPKREEIMESILFKCSDFVVVQFKDMDSSYAKRDAFTDSAISAKVNGEHKEKDLEPWDAGELTANEELEALENDVSNGWDPNDMFRYNEENYGVVSTYDSSLSSYTVPLERDNSEEFLKREARANQLAEEIESSAQYKARVALENDDRSEEEKYTAVQRNSSEREGHSINTRENKYIPPGQRNREVISWGSGRQNSPRMGQPGSGSMPSRSTSHTSDFNPNSGSDQRVVNGGVPWPSPCPSPSSRPPSRYQSGPNSLPPRAATPTRPPSRPPSRPSRPPSHPSAHGSPAPVSTMPKRMSSEGPPRMSPKAQRHPRNHRVSAGRGSISSGLEFVSHNPPSEAATPPVARTSPSGGTWSSVVSGVPRLSPKTHRPRSPRQNSIGNTPSGPVLASPQAGIIPTEAVAMPIPAASPTPASPASNRAVTPSSEAKDSRLQDQRQNSPAGNKENIKPNETSPSFSKAENKGISPVVSEHRKQIDDLKKFKNDFRLQPSSTSESMDQLLNKNREGEKSRDLIKDKIEPSAKDSFIENSSSNCTSGSSKPNSPSISPSILSNTEHKRGPEVTSQGVQTSSPACKQEKDDKEEKKDAAEQVRKSTLNPNAKEFNPRSFSQPKPSTTPTSPRPQAQPSPSMVGHQQPTPVYTQPVCFAPNMMYPVPVSPGVQPLYPIPMTPMPVNQAKTYRAVPNMPQQRQDQHHQSAMMHPASAAGPPIAATPPAYSTQYVAYSPQQFPNQPLVQHVPHYQSQHPHVYSPVIQGNARMMAPPTHAQPGLVSSSATQYGAHEQTHAMYACPKLPYNKETSPSFYFAISTGSLAQQYAHPNATLHPHTPHPQPSATPTGQQQSQHGGSHPAPSPVQHHQHQAAQALHLASPQQQSAIYHAGLAPTPPSMTPASNTQSPQNSFPAAQQTVFTIHPSHVQPAYTNPPHMAHVPQAHVQSGMVPSHPTAHAPMMLMTTQPPGGPQAALAQSALQPIPVSTTAHFPYMTHPSVQAHHQQQL

SEQ ID NO: 3639 - protein, 233 aa, Homo sapiens
MAATASPQPLATEDADSENSSFYYYDYLDEVAFMLCRKDAVVSFGKVFLPVFYSLIFVLGLSGNLLLLMVLLRYVPRRRMVEIYLLNLAISNLLFLVTLPFWGISVAWHWVFGSFLCKMVSTLYTINFYSGIFFISCMSLDKYLEIVHAQPYHRLRTRAKSLLLATIVWAVSLAVSIPDMVFVQTHENPKGVWNCHADFGGHGTIWKLFLRFQQNLLGFLLPLLAMIFFYSRI

SEQ ID NO: 3640 - protein, 138 aa, Homo sapiens
MGRPLLLPLLLLLQPPAFLQPGGSTGSGPSYLYGVTQPKHLSASMGGSVEIPFSFYYPWELAIVPNVRISWRRGHFHGQSFYSTRPPSIHKDYVNRLFLNWTEGQESGFLRISNLRKEDQSVYFCRVELDTRRSGRQQ

SEQ ID NO: 3641 - protein, 395 aa, Homo sapiens
MVSVNAPLGAPVESSYDTSPSEGTNLNAPNSLGVSALCAICGDRATGKHYGASSCDGCKGFFRRSVRKNHMYSCRFSRQCVVDKDKRNQCRYCRLKKCFRAGMKKEAVQNERDRISTRRSSYEDSSLPSINALLQAEVLSRQITSPVSGINGDIRAKKIASIADVCESMKEQLLVLVEWAKYIPAFCELPLDDQVALLRAHAGEHLLLGATKRSMVFKDVLLLGNDYIVPRHCPELAEMSRVSIRILDELVLPFQELQIDDNEYAYLKAIIFFDPDAKGLSDPGKIKRLRSQVQVSLEDYINDRQYDSRGRFGELLLLLPTLQSITWQMIEQIQFIKLFGMAKIDNLLQEMLLGGPCQAQEGRGWSGDSPGDRPHTVSSPLSSLASPLCRFGQVA

SEQ ID NO: 3642 - protein, 124 aa, Homo sapiens
MAATASPQPLATEDADSENSSFYYYDYLDEVAFMLCRKDAVVSFGKVFLPVFYSLIFVLGLSGNLLLLMVLLRYVPRRRMVEIYLLNLAISNLLFLVTLPFWGISVAWHWVFGSFLCKMVSTLY

SEQ ID NO: 3643 - protein, 233 aa, Homo sapiens
TLAGPRLPGIREKSRSPGSSQLRLLELRHSTLLKKVQGAAHFGPVWLASFGTVRTVYVAAPALVEELLRQEGPRPERCSFSPWTEHRRCRQRACGLLTAEGEEWQRLRSLLAPLLLRPQAAARYAGTLNNVVCDLVRRLRRQRGRGTGPPALVRDVAGEFYKFGLEGIAAVLLGSRLGCLEAQVPPDTETFIRAVGSVFVSTLLTMAMPHWLRHLVPGPWGRLCRDWDQMFAF

SEQ ID NO: 3644 - protein, 580 aa, Homo sapiens
MSLVPATNYIYTPLNQLKGGTIVNVYGVVKFFKPPYLSKGTDYCSVVTIVDQTNVKLTCLLFSGNYEALPIIYKNGDIVRFHRLKIQVYKKETQGITSSGFASLTFEGTLGAPIIPRTSSKYFNFTTEDHKMVEALRVWASTHMSPSWTLLKLCDVQPMQYFDLTCQLLGKAEVDGASFLLKVWDGTRTPFPSWRVLIQDLVLEGDLSHIHRLQNLTIDILVYDNHVHVARSLKVGSFLRIYSLHTKLQSMNSENQTMLSLEFHLHGGTSYGRGIRVLPESNSDVDQLKKDLESANLTANQHSDVICQSEPDDSFPSSGSVSLYEVERCQQLSATILTDHQYLERTPLCAILKQKAPQQYRIRAKLRSYKPRRLFQSVKLHCPKCHLLQEVPHEGDLDIIFQDGATKTPDVKLQNTSLYDSKIWTTKNQKGRKVAVHFVKNNGILPLSNECLLLIEGGTLSEICKLSNKFNSVIPVRSGHEDLELLDLSAPFLIQGTIHHYGCKQCSSLRSIQNLNSLVDKTSWIPSSVAEALGIVPLQYVFVMTFTLDDGTGVLEAYLMDSVSIRGQILPDSSIRSSDG

SEQ ID NO: 3645 - protein, 205 aa, Homo sapiens
MHFRNFNYSFSSLIACVANSDIFSESETRAKFESLFRTYDKDITFQYFKSFKRVRINFSNPFSAADARLQLHKTEFLGKEMKLYFAQTLHIGSSHLAPPNPDKQFLISPPASPPVGWKQVEDATPVINYDLLYAISKLGPGEQGPRVGGRQGETQLLPCTREQYHHYPRSSPEPMPACFVSFSVFFCATVPCAGSMPASWHHLQC

SEQ ID NO: 3646 - protein, 170 aa, Homo sapiens
MAATASPQPLATEDADSENSSFYYYDYLDEVAFMLCRKDAVVSFGKVFLPVFYSLIFVLGLSGNLLLLMVLLRYVPRRRMVEIYLLNLAISNLLFLVTLPFWGISVAWHWVFGSFLCKMVSTLYTINFYSGIFFISCMSLDKYLEIVHAQPYHRLRTRAKSLLLATIVWA

SEQ ID NO: 3647 - protein, 142 aa, Homo sapiens
MAATASPQPLATEDADSENSSFYYYDYLDEVAFMLCRKDAVVSFGKVFLPVFYSLIFVLGLSGNLLLLMVLLRYVPRRRMVEIYLLNLAISNLLFLVTLPFWGISVAWHWVFGSFLCKMVSTLYTINFYSGIFFISCMSLDK

SEQ ID NO: 3648 - protein, 1442 aa, Homo sapiens
MPFKIQWFFKAVADGLSLEKELEAALHRDDVEFISDLIACLLQGCYQRRDITPQTFHSYLEDIINYRWELEEGKPNPLREASFQDLPLRTRVEILHRLCDYRLDADDVFDLLKGLDADSLRVEPLGEDNSGALYWYFYGTRMYKEDPVQGKSNGELSLSRESEGQKNVSSIPGKTGKRRGRPPKRKKLQEEILLSEKQEENSLASEPQTRHGSQGPGQGTWWLLCQTEEEWRQVTESFRERTSLRERQLYKLLSEDFLPEICNMIAQKGKRPQRTKAELHPRWMSDHLSIKPVKQEETPVLTRIEKQKRKEEEEERQILLAVQKKEQEQMLKEERKRELEEKVKAVEDRAKRRKLREERAWLLAQGKELPPELSHLDPNSPMREEKKTKDLFELDDDFTAMYKVLDVVKAHKDSWPFLEPVDESYAPNYYQIIKAPMDISSMEKKLNGGLYCTKEEFVNDMKTMFRNCRKYNGESSEYTKMSDNLERCFHRAMMKHFPGEDGDTDEEFWIREDEKREKRRSRAGRSGGSHVWTRSRDPEGSSRKQQPMENGGKSLPPTRRAPSSGDDQSSSSTQPPREVGTSNGRGFSHPLHCGGTPSQAPFLNQMRPAVPGTFGPLRGSDPATLYGSSGVPEPHPGEPVQQRQPFTMQPPVGINSLRGPRLGTPEEKQMCGGLTHLSNMGPHPGSLQLGQISGPSQDGSMYAPAQFQPGFIPPRHGGAPARPPDFPESSEIPPSHMYRSYKYLNRVHSAVWNGNHGATNQGPLGPDEKPHLGPGPSHQPRTLGHVMDSRVMRPPVPPNQWTEQSGFLPHGVPSSGYMRPPCKSAGHRLQPPPVPAPSSLFGAPAQALRGVQGGDSMMDSPEMIAMQQLSSRVCPPGVPYHPHQPAHPRLPGPFPQVAHPMSVTVSAPKPALGNPGRAPENSEAQEPENDQAEPLPGLEEKPPGVGTSEGVYLTQLPHPTPPLQTDCTRQSSPQERETVGPELKSSSSESADNCKAMKGKNPWPSDSSYPGPAAQGCVRDLSTVADRGALSENGVIGEASPCGSEGKGLGSSGSEKLLCPRGRTLQETMPCTGQNAATPPSTDPGLTGGTVSQFPPLYMPGLEYPNSAAHYHISPGLQGVGPVMGGKSPASHPQHFPPRGFQSNHPHSGGFPRYRPPQGMRYSYHPPPQPSYHHYQRTPYYACPQSFSDWQRPLHPQGSPSGPPASQPPPPRSLFSDKNAMASLQGCETLNAALTSPTRMDAVAAKVPNDGQNPGPEEEKLDESMERPESPKEFLDLDNHNAATKRQSSLSASEYLYGTPPPLSSGMGFGSSAFPPHSVMLQTGPPYTPQRPASHFQPRAYSSPVAALPPHHPGATQPNGLSQEGPIYRCQEEGLGHFQAVMMEQIGTRSGIRGPFQEMYRPSGMQMHPVQSQASFPKTPTAATSQEEVPPHKPPTLPLDQS

SEQ ID NO: 3649 - protein, 540 aa, Homo sapiens
MPLRDETLREVWASDSGHEEESLSPEAPRRPKQRPAPAQRLRKKRTEAPESPCPTGSKPRKPGAGRTGRPREEPSPDPAQARAPQTVYARFLRDPEAKKRDPRETFLVARAPDAEDEEEEEEEDEEDEEEEAEEKKEKILLPPKKPLREKSSADLKERRAKAQGPRGDLGSPDPPPKPLRVRNKEAPAGEGTKMRKTKKKGSGEADKDPSGSPASARKSPAAMFLVGEGSPDKKALKKKGTPKGARKEEEEEEEAATVIKKSNQKGKAKGKGKKKEERAPSPPVEVDEPREFVLRPAPQGRTVRCRLTRDKKGMDRGMYPSYFLHLDTEKKVFLLAGRKRKRSKTANYLISIDPTNLSRGGENFIGKLRSNLLGNRFTVFDNGQNPQRGYSTNVASLRQELAAVIYETNVLGFRGPRRMTVIIPGMSAENERVPIRPRNASDGLLVRWQNKTLESLIELHNKPPVWNDDSGSYTLNFQGRVTQASVKNFQIVHADDPDYIVLQFGRVAEDAFTLDYRYPLCALQAFAIALSSFDGKLACE

SEQ ID NO: 3650 - protein, 314 aa, Homo sapiens
MVVVGILLAYLAGWVLEWRWLAVLGCVPPSLMLLLMCFMPETPRFLLTQHRRQEAMAALRFLWGSEQGWEDPPIGAEQSFHLALLRQPGIYKPFIIGVSLMAFQQLSGVNAVMFYAETIFEEAKFKDSSLASVVVGVIQVLFTAVAALIMDRAGRRLLLVLSGVVMVFSTSAFGAYFKLTQGGPGNSSHVAISAPVSAQPVDASVGLAWLAVGSMCLFIAGFAVGWGPIPWLLMSEIFPLHVKGVATGICVLTNWLMAFLVTKEFSSLMEVLRPYGAFWLASAFCIFSVLFTLFCVPETKGKTLEQITAHFEGR

SEQ ID NO: 3651 - protein, 254 aa, Homo sapiens
MQVQCQQSPVLAGSATLVALGALALYVAKPSGYGKHTESLKPAATRLPARAAWFLQELPSFAVPAGILARQPLSLFGPPGTVLLGLFCLHYFHRTFVYSLLNRGRPYPAILILRGTAFCTGNGVLQGYYLIYCAEYPDGWYTDIRFSLGVFLFILGMGINIHSDYILRQLRKPGEISYRIPQGGLFTYVSGANFLGEIIEWIGYALATWSLPALAFAFFSLCFLGLRAFHHHRFYLKMFEDYPKSRKALIPFIF

SEQ ID NO: 3652 - protein, 197 aa, Homo sapiens
MFGLKRNAVIGLNLYCGGAGLGAGSGGATRPGGRLLATGAKDTKPMGRSGATSRKALETLRRVGDGVQRNHETAFQGMLRKLDIKNEDDVKSLSRVMIHVFSDGVTNWGRIVTLISFGAFVAKHLKTINQESCIEPLAESITDVLVRTKRDWLVKQRGWDGFVEFFHVEDLEGGIRNVLLAFAGVAGVGAGLAYLIR

SEQ ID NO: 3653 - protein, 538 aa, Homo sapiens
KMLCSKDSLGLKEELTDEDREKVAVHEGINSGTAMSRGLYQPATIFMGRQMSAILSMRDFSTEHKSPQPTKNFSIPDPHSHRQTAQSSNVTDSCVVQTSNDTQCLNKSDNIDGKASLQIGEKMPVTASVLSEEEQTHCLEIGSNTRHGKSNLSEGKKSAELNSPLRERLSPENRTTDLKCDSSSGSEGEILTREHIEVEEKRASPPVSPIPVSEYCESENKWSQEKHSPWEGVSDHLAHREPKSQKPFRKMQEEEEESWSTSSDLTISISEDDLILESPEPQPNPGGKMEGEDGIEALKLIHAEQERVALSTEKNCILQTLSSPDSEKESSTNAPTREPGQTPDSDVPRAQVGQHVATLKEHDNSVKEEATALLRKALTEECGRRSAIHSSESSCSLPSILNDNSGIKEAKPAVWLNSVPTREQETEAYQLLKKATLQDNTNQTENRFQKTDASVSHLSGLNIGSGAFETKTANKIASEASFSSSEGSPLSRHENKKKPVINLKSNALWDESDDSNSEIEAALRPRNHNTDDSDDFYD

SEQ ID NO: 3654 - protein, 257 aa, Homo sapiens
MAWSSKSWLCLIASSCPRDTLLPSAHHASPVPASHLTQVSNGCVSKILGRYYRTGVLEPKGIGGSKPRLATPPVVARIAQLKGECPALFAWEIQRQLCAEGLCTQDKTPSVSSINRVLRALQEDQGLPCTRLRSPAVLAPAVLTPHSGSETPRGTHPGTGHRNRTIFSPSQAEALEKEFQRGQYPDSVARGKLATATSLPEDTVRVWFSNRRAKWRRQEKLKWEMQLPGASQGLTVPRVAPGIISAQGPTVFMSRKY

SEQ ID NO: 3655 - protein, 1338 aa, Homo sapiens [sequence omitted]

SEQ ID NO: 3656 - protein, 461 aa, Homo sapiens
MSGSSGPAPTPAVTKARRGDLTLQHGGGGRLGPRVGALTAAGGPCRKQLPPPPLSSLLGQGPGPGVQLDIASQSLDQEILLKVKTEIEEELKSLDKEISEAFTSTGFDRHTSPVFSPANPESSMEDCLAHLGEKVSQELKEPLHKALQMLLSQPVTYQAFRECTLETTVHASGWNKGTVFSLESEEEEYPGITAEDSNDIYILPSDNSGQVSPPESPTVTTSWQSESLPVSLSASQSWHTESLPVSLGPESWQQIAMDPEEVKSLDSNGAGEKSENNSSNSDIVHVEKEEVPEGMEEAAVASVVLPARELQEALPEAPAPLLPHITATSLLGTREPDTEVITVEKSSPATSLFVELDEEEVKAATTEPTEVEEVVPALEPTETLLSEKEINAREESLVEELSPASEKKPVPPSEGKSRLSPAGEMKPMPLSEGKSILLFGGAAAVAILAVAIGVALALRKK

SEQ ID NO: 3657 - protein, 1215 aa, Homo sapiens
MEQLPGVPPGPPHPVRPPPPPPPPMPLQLEAHLRSHGLEPAAPSPRLRPEESLDPPGAMQELLGALEPLPPAPGDTGVGPPNSEGKDPAGAYRSPSPQGTKAPRFVPLTSICFPDSLLQDEERSFFPTMEEMFGGGAADDYGKAGPPEDEGDPKAGAGPPPGPPAYDPYGPYCPGRASGAGPETPGLGLDPNKPPELPSTVNAEPLGLIQSGPHQAAPPPPPPPPPPPAPASEPKGGLTSPIFCSTKPKKLLKTSSFHLLRRRDPPFQTPKKLYAQEYEFEADEDKADVPADIRLNPRRLPDLVSSCRSRPALSPLGDIDFCPPNPGPDGPRRRGRKPTKAKRDGPPRPRGRPRIRPLEVPTTAGPASASTPTDGAKKPRGRGRGRGRKAEEAGGTRLEPLKPLKIKLSVPKAGEGLGTSSGDAISGTDHNSLDSSLTREKIEAKIKEVEEKQPEMKSGFMASFLDFLKSGKRHPPLYQAGLTPPLSPPKSVPPSVPARGLQPQPPATPAVPHPPPSGAFGLGGALEAAESEGLGLGCPSPCKRLDEELKRNLETLPSFSSDEEDSVAKNRDLQESISSAISALDDPPLAGPKDTSTPDGPPLAPAAAVPGPPPLPGLPSANSNGTPEPPLLEEKPPPTPPPAPTPQPQPPPPPPPPQPALPSPPPLVAPTPSSPPPPPLPPPPPPAMPSPPPPPPPAAAPLAAPPEEPAAPSPEDPELPDTRPLHLAKKQETAAVCGETDEEAGESGGEGIFRERDEFVIRAEDIPSLKLALQTGREPPPIWRVQKALLQKFTPEIKDGQRQFCATSNYLGYFGDAKNRYQRLYVKFLENVNKKDYVRVCARKPWHRPPVPVRRSGQAKNPVSAGGSSAPPPKAPAPPPKPETPEKTTSEKPPEQTPETAMPEPPAPEKPSLLRPVEKEKEKEKVTRGERPLRGERATSGRQTRPERSLATGQPATSRLPKARPTKVKAEPPPKKRKKWLKEAGGNATAGGGPPGSSSDSESSPGAPSEDERAVPGRLLKTRAMREMYRSYVEMLVSTALDPDMIQALEDTHDELYLPPMRKIDGLLNEHKKKVLKRLSLSPALQDALHTFPQLQVEQSGEGSPEEGAVRLRPAGEPYNRKTLSKLKRSVVRAQEFKVELEKSGYYTLYHSLHHYKYHTFLRCRDQTLAIEGGAEDLGQEEVVQQCMRNQPWLEQLFDSFSDLLAQAQAHSRCG

SEQ ID NO: 3658 - protein, 179 aa, Homo sapiens
MLWEQIKQIIQRITWVSPPAITLEWKRKVAQEAIESLSASKLAKSICSQFRTRLNSSHEAFAASLRQLEAGHSGRLEKTEDLWLRVRKDHAPRLARLSLESCSLQDVLLHRKPKLGQELGRGQYGVVYLCDNWGGHFPCALKSVVPPDEKHWNDLALEFHYMRWVLASFISMRKIQRRI

SEQ ID NO: 3659 - protein, 570 aa, Homo sapiens
MQLEYETQIKKMLCSKDSLGLKEELTDEDREKVAVHEGINSGTAMSRGLYQPATIFMGRQMSAILSMRDFSTEHKSPQPTKNFSIPDPHSHRQTAQSSNVTDSCVVQTSNDTQCLNKSDNIDGKASLQIGEKMPVTASVLSEEEQTHCLEIGSNTRHGKSNLSEGKKSAELNSPLRERLSPENRTTDLKCDSSSGSEGEILTREHIEVEEKRASPPVSPIPVSEYCESENKWSQEKHSPWEGVSDHLAHREPKSQKPFRKMQEEEEESWSTSSDLTISISEDDLILESPEPQPNPGGKMEGEDGIEALKLIHAEQERVALSTEKNCILQTLSSPDSEKESSTNAPTREPGQTPDSDVPRAQVGQHVATLKEHDNSVKEEATALLRKALTEECGRRSAIHSSESSCSLPSILNDNSGIKEAKPAVWLNSVPTREQEVSSGCGDKSKKENVAADIPITETEAYQLLKKATLQDNTNQTENRFQKTDASVSHLSGLNIGSGAFETKTANKIASEASFSSSEGSPLSRHENKKKPVINLKSNALWDESDDSNSEIEAALRPRNHNTDDSDDFYD

SEQ ID NO: 3660 - protein, 1539 aa, Homo sapiens
MFRQFYLWTCLASGIILGSLFEICLGQYDDDCKLARGGPPATIVAIDEESRNGTILVDNMLIKGTAGGPDPTIELSLKDNVDYWVLMDPVKQMLFLNSTGRVLDRDPPMNIHSIVVQVQCINKKVGTIIYHEVRIVVRDRNDNSPTFKHESYYATVNELTPVGTTIFTGFSGDNGATDIDDGPNGQIEYVIQYNPDDPTSNDTFEIPLMLTGNIVLRKRLNYEDKTRYFVIIQANDRAQNLNERRTTTTTLTVDVLDGDDLGPMFLPCVLVPNTRDCRPLTYQAAIPELRTPEELNPIIVTPPIQAIDQDRNIQPPSDRPGILYSILVGTPEDYPRFFHMHPRTAELSLLEPVNRDFHQKFDLVIKAEQDNGHPLPAFAGLHIEILDENNQSPYFTMPSYQGYILESAPVGATISDSLNLTSPLRIVALDKDIEDTKDPELHLFLNDYTSVFTVTQTGITRYLTLLQPVDREEQQTYTFSITAFDGVQESEPVIVNIQVMDANDNTPTFPEISYDVYVYTDMRPGDSVIQLTAVDADEGSNGEITYEILVGAQGDFIINKTTGLITIAPGVEMIVGRTYALTVQAADNAPPAERRNSICTVYIEVLPPNNQSPPRFPQLMYSLEISEAMRVGAVLLNLQATDREGDSITYAIENGDPQRVFNLSETTGILTLGKALDRESTDRYILIITASDGRPDGTSTATVNIVVTDVNDNAPVFDPYLPRNLSVVEEEANAFVGQVKATDPDAGINGQVHYSLGNFNNLFRITSNGSIYTAVKLNREVRDYYELVVVATDGAVHPRHSTLTLAIKVLDIDDNSPVFTNSTYTVLVEENLPAGTTILQIEAKDVDLGANVSYRIRSPEVKHFFALHPFTGELSLLRSLDYEAFPDQEASITFLVEAFDIYGTMPPGIATVTVIVKDMNDYPPVFSKRIYKGMVAPDAVKGTPITTVYAEDADPPGLPASRVRYRVDDVQFPYPASIFEVEEDSGRVITRVNLNEEPTTIFKLVVVAFDDGEPVMSSSATVKILVLHPGEIPRFTQEEYRPPPVSELATKGTMVGVISAAAINQSIVYSIVSGNEEDTFGINNITGVIYVNGPLDYETRTSYVLRVQADSLEVVLANLRVPSKSNTAKVYIEIQDENNHPPVFQKKFYIGGVSEDARMFTSVLRVKATDKDTGNYSVMAYRLIIPPIKEGKEGFVVETYTGLIKTAMLFHNMRRSYFKFQVIATDDYGKGLSGKADVLVSVVNQLDMQVIVSNVPPTLVEKKIEDLTEILDRYVQEQIPGAKVVVESIGARRHGDAFSLEDYTKCDLTVYAIDPQTNRAIDRNELFKFLDGKLLDINKDFQPYYGEGGRILEIRTPEAVTSIKKRGESLGYTEGALLALAFIIILCCIPAILVVLVSYRQFKVRQAECTKTARIQAALPAAKPAVPAPAPVAAPPPPPPPPPGAHLYEELGDSSMHKNYPWSLELILARNMDKIITVMSMGMKCLNMGVAVDCYHQLDRRNMVRWLVKLRKNMRRKRKSQRKLKNQRLKLESLVRRKK

SEQ ID NO: 3661 - protein, 189 aa, Homo sapiens
MAFIAKSFYDLSAISLDGEKVDFNTFRGRAVLIENVASLGTTTRDFTQLNELQCRFPRRLVVLGFPCNQFGHQENCQNEEILNSLKYVRPGGGYQPTFTLVQKCEVNGQNEHPVFAYLKDKLPYPYDDPFSLMTDPKLIIWSPVRRSDVAWNFEKFLIGPEGEPFRRYSRTFPTINIEPDIKRLLKVAI

SEQ ID NO: 3662 - protein, 1533 aa, Homo sapiens
MPVKRLREVVSQNHGDHLVLLKDELPCVPPALSANKRLPVGTGTSLNGTSRGSSDLTSARNCYQPLLENPMVSESDFSKDVAVQVLPLDKIEENNKQKANDIFISQYTMGQKDALRTVLKQKAQSMPVFKEVKVHLLEDAGIEKDAVTQETRISPSGIDSATTVAAATAAAIATAAPLIKVQSDLEAKVNSVTELLSKLQETDKHLQRVTEQQTSIQRKQEKLHCHDHEKQMNVFMEQHIRHLEKLQQQQIDIQTHFISAALKTSSFQPVSMPSSRAVEKYSVKPEHPNLGSCNPSLYNTFASKQAPLKEVEDTSFDKQKSPLETPAPRRFAPVPVSRDDELSKRENLLEEKENMEVSCHRGNVRLLEQILNNNDSLTRKSESSNTTSLTRSKIGWTPEKTNRFPSCEELETTKVTMQKSDDVLHDLGQKEKETNSMVQPKESLSMLKLPDLPQNSVKLQTTNTTRSVLKDAEKILRGVQNNKKVLEENLEAIIRAKDGAAMYSLINALSTNREMSEKIRIRKTVDEWIKTISAEIQDELSRTDYEQKRFDQKNQRTKKGQNMTKDIRTNTQDKTVNKSVIPRKHSQKQIEEHFRNLPMRGMPASSLQKERKEGLLKATTVIQDEDYMLQVYGKPVYQGHRSTLKKGPYLRFNSPSPKSRPQRPKVIERVKGTKVKSIRTQTDFYATKPKKMDSKMKHSVPVLPHGDQQYLFSPSREMPTFSGTLEGHLIPMAILLGQTQSNSDTMPPAGVIVSKPHPVTVTTSIPPSSRKVETGVKKPNIAIVEMKSEKKDPPQLTVQVLPSVDIDSISNSSADVLSPLSSPKEASLPPVQTWIKTPEIMKVDEEEVKFPGTNFDEIIDVIQEEEKCDEIPDSEPILEFNRSVKADSTKYNGPPFPPVASTFQPTADILDKVIERKETLENSLIQWVEQEIMSRIISGLFPVQQQIAPSISVSVSETSEPLTSDIVEGTSSGALQLFVDAGVPVNSNVIKHFVNEALAETIAVMLGDREAKKQGPVATGVSGDASTNETYLPARVCTPLPTPQPTPPCSPSSPAKECVLVKTPDSSPCDSDHDMAFPVKEICAEKGDDMPAIMLVNTPTVTPTTTPPPAAAVFTPTLSDISIDKLKVSSPELPKPWGDGDLPLEEENPNSPQEELHPRAIVMSVAKDEEPESMDFPAQPPPPEPVPFMPFPAGTKAPSPSQMPGSDSSTLESTLSVTVTETETLDKPISEGEILFSCGQKLAPKILEDIGLYLTNLNDSLSSTLHDAVEMEDDPPSEGQVIRMSHKKFHADAILSFAKQNQESAVSQQAVYHSEDLENSVGELSEGQRPQLTAAAENILMGHSLYMQPPVTNTQSLDQQCDPKPLSRQFDTVSGSIYEDSCASHGPMSLGELELEPNSKLVLPTTLLTAQENDVNLPVAAEDFSQYQLKQNQDVKQVEHKPSQSYLRVRNKSDIAPSQQQVSPGDMDRTQIELNPYLTCVFSGGKAVPLSASQMPPAKMSVMLPSVNLEDCSQSLSLSTMQEDMESSGADTF

SEQ ID NO: 3663 - protein, 3684 aa, Homo sapiens
MLWWEEVEDCYEREDVQKKTFTKWVNAQFSKFGKQHIENLFSDLQDGRRLLDLLEGLTGQKLPKEKGSTRVHALNNVNKALRVLQNNNVDLVNIGSTDIVDGNHKLTLGLIWNIILHWQVKNVMKNIMAGLQQTNSEKILLSWVRQSTRNYPQVNVINFTTSWSDGLALNALIHSHRPDLFDWNSVVCQQSATQRLEHAFNIARYQLGIEKLLDPEDVDTTYPDKKSILMYITSLFQVLPQQVSIEAIQEVEMLPRPPKVTKEEHFQLHHQMHYSQQITVSLAQGYERTSSPKPRFKSYAYTQAAYVTTSDPTRSPFPSQHLEAPEDKSFGSSLMESEVNLDRYQTALEEVLSWLLSAEDTLQAQGEISNDVEVVKDQFHTHEGYMMDLTAHQGRVGNILQLGSKLIGTGKLSEDEETEVQEQMNLLNSRWECLRVASMEKQSNLHRVLMDLQNQKLKELNDWLTKTEERTRKMEEEPLGPDLEDLKRQVQQHKVLQEDLEQEQVRVNSLTHMVVVVDESSGDHATAALEEQLKVLGDRWANICRWTEDRWVLLQDILLKWQRLTEEQCLFSAWLSEKEDAVNKIHTTGFKDQNEMLSSLQKLAVLKADLEKKKQSMGKLYSLKQDLLSTLKNKSVTQKTEAWLDNFARCWDNLVQKLEKSTAQISQAVTTTQPSLTQTTVMETVTTVTTREQILVKHAQEELPPPPPQKKRQITVDSEIRKRLDVDITELHSWITRSEAVLQSPEFAIFRKEGNFSDLKEKVNAIEREKAEKFRKLQDASRSAQALVEQMVNEGVNADSIKQASEQLNSRWIEFCQLLSERLNWLEYQNNIIAFYNQLQQLEQMTTTAENWLKIQPTTPSEPTAIKSQLKICKDEVNRLSDLQPQIERLKIQSIALKEKGQGPMFLDADFVAFTNHFKQVFSDVQAREKELQTIFDTLPPMRYQETMSAIRTWVQQSETKLSIPQLSVTDYEIMEQRLGELQALQSSLQEQQSGLYYLSTTVKEMSKKAPSEISRKYQSEFEEIEGRWKKLSSQLVEHCQKLEEQMNKLRKIQNHIQTLKKWMAEVDVFLKEEWPALGDSEILKKQLKQCRLLVSDIQTIQPSLNSVNEGGQKIKNEAEPEFASRLETELKELNTQWDHMCQQVYARKEALKGGLEKTVSLQKDLSEMHEWMTQAEEEYLERDFEYKTPDELQKAVEEMKRAKEEAQQKEAKVKLLTESVNSVIAQAPPVAQEALKKELETLTTNYQWLCTRLNGKCKTLEEVWACWHELLSYLEKANKWLNEVEFKLKTTENIPGGAEEISEVLDSLENLMRHSEDNPNQIRILAQTLTDGGVMDELINEELETFNSRWRELHEEAVRRQKLLEQSIQSAQETEKSLHLIQESLTFIDKQLAAYIADKVDAAQMPQEAQKIQSDLTSHEISLEEMKKHNQGKEAAQRVLSQIDVAQKKLQDVSMKFRLFQKPANFEQRLQESKMILDEVKMHLPALETKSVEQEVVQSQLNHCVNLYKSLSEVKSEVEMVIKTGRQIVQKKQTENPKELDERVTALKLHYNELGAKVTERKQQLEKCLKLSRKMRKEMNVLTEWLAATDMELTKRSAVEGMPSNLDSEVAWGKATQKEIEKQKVHLKSITEVGEALKTVLGKKETLVEDKLSLLNSNWIAVTSRAEEWLNLLLEYQKHMETFDQNVDHITKWIIQADTLLDESEKKKPQQKEDVLKRLKAELNDIRPKVDSTRDQAANLMANRGDHCRKLVEPQISELNHRFAAISHRIKTGKASIPLKELEQFNSDIQKLLEPLEAEIQQGVNLKEEDFNKDMNEDNEGTVKELLQRGDNLQQRITDERKREEIKIKQQLLQTKHNALKDLRSQRRKKALEISHQWYQYKRQADDLLKCLDDIEKKLASLPEPRDERKIKEIDRELQKKKEELNAVRRQAEGLSEDGAAMAVEPTQIQLSKRWREIESKFAQFRRLNFAQIHTVREETMMVMTEDMPLEISYVPSTYLTEITHVSQALLEVEQLLNAPDLCAKDFEDLFKQEESLKNIKDSLQQSSGRIDIIHSKKTAALQSATPVERVKLQEALSQLDFQWEKVNKMYKDRQGRFDRSVEKWRRFHYDIKIFNQWLTEAEQFLRKTQIPENWEHAKYKWYLKVSLFVFSKHTFCLQRQKTGEEIIQQSSKTDASILQEKLGSLNLRWQEVCKQLSDRKKRLEEQKNILSEFQRDLNEFVLWLEEADNIASIPLEPGKEQQLKEKLEQVKLLVEELPLRQGILKQLNETGGPVLVSAPISPEEQDKLENKLKQTNLQWIKVSRALPEKQGEIEAQIKDLGQLEKKLEDLEEQLNHLLLWLSPIRNQLEIYNQPNQEGPFDVKETEIAVQAKQPDVEEILSKGQHLYKEKPATQPVKRKLEDLSSEWKAVNRLLQELRAKQPDLAPGLTTIGASPTQTVTLVTQPVVTKETAISKLEMPSSLMLEVPALADFNRAWTELTDWLSLLDQVIKSQRVMVGDLEDINEMIIKQKATMQDLEQRRPQLEELITAAQNLKNKTSNQEARTIITDRIERIQNQWDEVQEHLQNRRQQLNEMLKDSTQWLEAKEEAEQVLGQARAKLESWKEGPYTVDAIQKKITETKQLAKDLRQWQTNVDVANDLALKLLRDYSADDTRKVHMITENINASWRSIHKRVSEREAALEETHRLLQQFPLDLEKFLAWLTEAETTANVLQDATRKERLLEDSKGVKELMKQWQDLQGEIEAHTDVYHNLDENSQKILRSLEGSDDAVLLQRRLDNMNFKWSELRKKSLNIRSHLEASSDQWKRLHLSLQELLVWLQLKDDELSRQAPIGGDFPAVQKQNDVHRAFKRELKTKEPVIMSTLETVRIFLTEQPLEGLEKLYQEPRELPPEERAQNVTRLLRKQAEEVNTEWEKLNLHSADWQRKIDETLERLRELQEATDELDLKLRQAEVIKGSWQPVGDLLIDSLQDHLEKVKALRGEIAPLKENVSHVNDLARQLTTLGIQLSPYNLSTLEDLNTRWKLLQVAVEDRVRQLHEAHRDFGPASQHFLSTSVQGPWERAISPNKVPYYINHETQTTCWDHPKMTELYQSLADLNNVRFSAYRTAMKLRRLQKALCLDLLSLSAACDALDQHNLKQNDQPMDILQIINCLTTIYDRLEQEHNNLVNVPLCVDMCLNWLLNVYDTGRTGRIRVLSFKTGIISLCKAHLEDKYRYLFKQVASSTGFCDQRRLGLLLHDSIQIPRQLGEVASFGGSNIEPSVRSCFQFANNKPEIEAALFLDWMRLEPQSMVWLPVLHRVAAAETAKHQAKCNICKECPIIGFRYRSLKHFNYDICQSCFFSGRVAKGHKMHYPMVEYCTPTTSGEDVRDFAKVLKNKFRTKRYFAKHPRMGYLPVQTVLEGDNMETPVTLINFWPVDSAPASSPQLSHDDTHSRIEHYASRLAEMENSNGSYLNDSISPNESIDDEHLLIQHYCQSLNQDSPLSQPRSPAQILISLESEERGELERILADLEEENRNLQAEYDRLKQQHEHKGLSPLPSPPEMMPTSPQSPRDAELIAEAKLLRQHKGRLEARMQILEDHNKQLESQLHRLRQLLEQPQAEAKVNGTTVSSPSTSLQRSDSSQPMLLRVVGSQTSDSMGEEDLLSPPQDTSTGLEEVMEQLNNSFPSSRGRNTPGKPMREDTM

SEQ ID NO: 3664 - protein, 1972 aa, Homo sapiens
MAADDDNGDGTSLFDVFSASPLKNNDEGSLDIYAGLDSAVSDSASKSCVPSRNCLDLYEEILTEEGTAKEATYNDLQVEYGKCQLQMKELMKKFKEIQTQNFSLINENQSLKKNISALIKTARVEINRKDEEISNLHQRLSEFPHFRNNHKTARTFDTVKTKDLKSRSPHLDDCSKTDHRAKSDVSKDVHHSTSLPNLEKEGKPHSDKRSTSHLPTSVEKHCTNGVWSRSHYQVGEGSSNEDSRRGRKDIRHSQFNRGTERVRKDLSTGCGDGEPRILEASQRLQGHPEKYGKGEPKTESKSSKFKSNSDSDYKGERINSSWEKETPGERSHSRVDSQSDKKLERQSERSQNINRKEVKSQDKEERKVDQKPKSVVKDQDHWRRSERASLPHSKNEITFSHNSSKYHLEERRGWEDCKRDKSVNSHSFQDGRCPSSLSNSRTHKNIDSKEVDAMHQWENTPLKAERHRTEDKRKREQESKEENRHIRNEKRVPTEHLQKTNKETKKTTTDLKKQNEPKTDKGEVLDNGVSEGADNKELAMKAESGPNETKNKDLKLSFMKKLNLTLSPAKKQPVSQDNQHKITDIPKSSGVCDSESSMQVKTVAYVPSISEHILGEAAVSEHTMGETKSTLLEPKVALLAVTEPRIGISETNKEDENSLLVRSVDNTMHCEEPICGTETSFPSPMEIQQTESLFPSTGMKQTINNGRAAAPVVMDVLQTDVSQNFGLELDTKRNDNSDYCGISEGMEMKVALSTTVSETTESILQPSIEEADILPIMLSEDNNPKFEPSVIVTPLVESKSCHLEPCLPKETLDSSLQQTELMDHRMATGETNSVYHDDDNSVLSIDLNHLRPIPEAISPLNSPVRPVAKVLRNESPPQVPVYNNSHKDVFLPNSAHSTSKSQSDLNKENQKPIYKSDKCTEADTCKNSPLDELEEGEIRSDSETSKPQESFEKNSKRRVSADVRKSKTIPRRGKSTVCLDKDSRKTHVRIHQTNNKWNKRPDKSSRSSKTEKKDKVMSTSSLEKIVPIIAVPSSEQEIMHMLRMIRKHVRKNYMKFKAKFSLIQFHRIIESAILSFTSLIKHLNLHKISKSVTTLQKNLCDIIESKLKQVKKNGIVDRLFEQQLPDMKKKLWKFVDDQLDYLFAKLKKILVCDSKSFGRDSDEGKLEKTSKQNAQYSNSQKRSVDNSNRELLKEKLSKSEDPVHYKSLVGCKKSEENYQDQNNSSINTVKHDIKKNFNICFDNIKNSQSEERSLEVHCPSTPKSEKNEGSSIEDAQTSQHATLKPERSFEILTEQQASSLTFNLVSDAQMGEIFKSLLQGSDLLDSSVNCTEKSEWELKTPEKQLLETLKCESIPACTTEELVSGVASPCPKMISDDNWSLLSSEKGPSLSSGLSLPVHPDVLDESCMFEVSTNLPLSKDNVCSVEKSKPCVSSILLEDLAVSLTVPSPLKSDGHLSFLKPDMSSSSTPEEVISAHFSEDALLEEEDASEQDIHLALESDNSSSKSSCSSSWTSRSVAPGFQYHPNLPMHAVIMEKSNDHFIVKIRRATPSTSSGLKQSMMPDELLTSLPRHGKEADEGPEKEYISCQNTVFKSVEELENSNKNVDGSKSTHEEQSSMIQTQVPDIYEFLKDASDKMGHSDEVADECFKLHQVWETKVPESIEELPSMEEISHSVGEHLPNTYVDLTKDPVTETKNLGEFIEVTVLHIDQLGCSGGNLNQSAQILDNSLQADTVGAFIDLTQDASSEAKSEGNHPALAVEDLGCGVIQVDEDNCKEEKAQVANRPLKCIVEETYIDLTTESPSSCEVKKDELKSEPGSNCDNSELPGTLHNSHKKRRNISDLNHPHKKQRKETDLTNKEKTKKPTQDSCENTEAHQKKASKKKAPPVTKDPSSLKATPGIKDSSAALATSTSLSAKNVIKKKGEIIILWTRNDDREILLECQKRGPSFKTFAYLAAKLDKNPNQVTTQFLHL

SEQ ID NO: 3665 - protein, 354 aa, Homo sapiens
MDDLMLSPDDIEQWFTEDPGPDEAPRMPEAAPPVAPAPAAPTPAAPAPAPSWPLSSSVPSQKTYQGSYGFRLGFLHSGTAKSVTCTYSPALNKMFCQLAKTCPVQLWVDSTPPPGTRVRAMAIYKQSQHMTEVVRRCPHHERCSDSDGLAPPQHLIRVEGNLRVEYLDDRNTFRHSVVVPYEPPEVGSDCTTIHYNYMCNSSCMGGMNRRPILTIITLEDSSGNLLGRNSFEVRVCACPGRDRRTEEENLRKKGEPHHELPPGSTKRALPNNTSSSPQPKKKPLDGEYFTLQIRGRERFEMFRELNEALELKDAQAGKEPGGSRAHSSHLKSKKGQSTSRHKKLMFKTEGPDSD

SEQ ID NO: 3666 - protein, 770 aa, Homo sapiens
MLQQVNGHNPGSDGQAREYLREDLQEFLGGEVLLYKLDDLTRVNPVTLETVLRCLQARYMADTFYTNAGCTLVALNPFKPVPQLYSPELMREYHAAPQPQKLKPHVFTVGEQTYRNVKSLIEPVNQSIVVSGESGAGKTWTSRCLMKFYAVVATSPASWESHKIAERIEQRILNSNPVMEAFGNACTLRNNNSSRFGKFIQLQLNRAQQMTGAAVQTYLLEKTRVACQASSERNFHIFYQICKGASEDERLQWHLPEGAAFSWLPNPERSLEEDCFEVTREAMLHLGIDTPTQNNIFKVLAGLLHLGNIQFAASEDEAQPCQPMDDAKYSVRTAASLLGLPEDVLLEMVQIRTIRAGRQQQVFRKPCARAECDTRRDCLAKLIYARLFDWLVSVINSSICADTDSWTTFIGLLDVYGFESFPDNSLEQLCINYANEKLQLEACGLVETIHISAAGFPIRVSHRNFVERYKLLRRLHPCTSSGPDSPYPAKGLPEWCPHSEEATLEPLIQDILHTLPVLTQAAAITGDSAEAMPAPMHCGRTKVFMTDSMLELLECGRARVLEQCARCIQGGWRRHRHREQERQWRAVMLIQAAIRSWLTRKHIQRLHAAATVIKRAWQKWRIRMACLAAKELDGVEEKHFSQAPCSLSTSPLQTRLLEAIIRLWPLGLVLANTAMGVGSFQRKLVVWACLQLPRGSPSSYTVQTAQDQAGVTSIRALPQGSIKFHCRKSPLRYADICPEPSPYSITGFNQILLERHRLIHVTSSAFTGLG

SEQ ID NO: 3667 - protein, 749 aa, Homo sapiens
MAEQVLPQALYLSNMRKAVKIRERTPEDIFKPTNGIIHHFKTMHRYTLEMFRTCQFCPQFREIIHKALIDRNIQATLESQKKLNWCREVRKLVALKTNGDGNCLMHATSQYMWGVQDTDLVLRKALFSTLKETDTRNFKFRWQLESLKSQEFVETGLCYDTRNWNDEWDNLIKMASTDTPMARSGLQYNSLEEIHIFVLCNILRRPIIVISDKMLRSLESGSNFAPLKVGGIYLPLHWPAQECYRYPIVLGYDSHHFVPLVTLKDSGPEIRAVPLVNRDRGRFEDLKVHFLTDPENEMKEKLLKEYLMVIEIPVQGWDHGTTHLINAAKLDEANLPKEINLVDDYFELVQHEYKKWQENSEQGRREGHAQNPMEPSVPQLSLMDVKCETPNCPFFMSVNTQPLCHECSERRQKNQNKLPKLNSKPGPEGLPGMALGASRGEAYEPLAWNPEESTGGPHSAPPTAPSPFLFSETTAMKCRSPGCPFTLNVQHNGFCERCHNARQLHASHAPDHTRHLDPGKCQACLQDVTRTFNGICSTCFKRTTAEASSSLSTSLPPSCHQRSKSDPSRLVRSPSPHSCHRAGNDAPAGCLSQAARTPGDRTGTSKCRKAGCVYFGTPENKGFCTLCFIEYRENKHFAAASGKVSPTASRFQNTIPCLGRECGTLGSTMFEGYCQKCFIEAQNQRFHEAKRTEEQLRSSQRRDVPRTTQSTSRPKCARASCKNILACRSEELCMECQHQPEDGPWGPPG

SEQ ID NO: 3668 - protein, 1127 aa, Homo sapiens
MAECGRGGAAGGALPTSPGPALGAKGALKAGVGEGGGGGGRLGHGRARYDSGGVSNGDCSLGVSGDEARASPTRGPRGVALAPTPSAVVCTLPRESKPGGLPRRSSIIKDGTKQKRERKKTVSFSSMPTEKKISSASDCINSMVEGSELKKVRSNSRIYHRYFLLDADMQSLRWEPSKKDSEKAKIDIKSIKEVRTGKNTDIFRSNGISDQISEDCAFSVIYGENYESLDLVANSADVANIWVTGLRYLISYGKHTLDMLESSQDNMRTSWVSQMFSEIDVDNLGHITLCNAVQCIRNLNPGLKTSKIELKFKELHKSKDKAGTEVTKEEFIEVFHELCTRPEIYFLLVQFSSNKEFLDTKDLMMFLEAEQGVAHINEEISLEIIHKYEPSKEGQEKGWLSIDGFTNYLMSPDCYIFDPEHKKVCQDMKQPLSHYFINSSHNTYLIEDQFRGPSDITGYIRALKMGCRSVELDVWDGPDNEPVIYTGHTMTSQIVFRSVIDIINKYAFFASEYPLILCLENHCSIKQQKVMVQHMKKLLGDKLYTTSPNVEESYLPSPDVLKGKILIKAKKLSSNCSGVEGDVTDEDEGAEMSQRMGKENMEQPNNVPVKRFQLCKELSELVSICKSVQFKEFQVSFQVQKYWEVCSFNEVLASKYANENPGDFVNYNKRFLARVFPSPMRIDSSNMNPQDFWKCGCQIVAMNFQTPGLMMDLNIGWFRQNGNCGYVLRPAIMREEVSFFSANTKDSVPGVSPQLLHIKIISGQNFPKPKGSGAKGDVVDPYVYVEIHGIPADCAEQRTKTVHQNGDAPIFDESFEFQINLPELAMVRFVVLDDDYIGDEFIGQYTIPFECLQTGYRHVPLQSLTGEVLAHASLFVHVAITNRRGGGKPHKRGLSVRKGKKSREYASLRTLWIKTVDEVFKNAQPPIRDATDLRENMQNAVVSFKELCGLSSVANLMQCMLAVSPRFLGPDNTPLVVLNLSEQYPTMELQGIVPEVLKKIVTTYDMMIQSLKALIENADAVYEKIVHCQKAAMEFHEHLHSIGTKEGLKERKLQKAVESFTWNITILKGQADLLKYAKNETLENLKQIHFAAVSCGLNKPGTENADVQKPRRSLEVIPEKANDETGE

SEQ ID NO: 3669 - protein, 1681 aa, Homo sapiens
MFRQFYLWTCLASGIILGSLFEICLGQYDDDWQYEDCKLARGGPPATIVAIDEESRNGTILVDNMLIKGTAGGPDPTIELSLKDNVDYWVLMDPVKQMLFLNSTGRVLDRDPPMNIHSIVVQVQCINKKVGTIIYHEVRIVVRDRNDNSPTFKHESYYATVNELTPVGTTIFTGFSGDNGATDIDDGPNGQIEYVIQYNPDDPTSNDTFEIPLMLTGNIVLRKRLNYEDKTRYFVIIQANDRAQNLNERRTTTTTLTVDVLDGDDLGPMFLPCVLVPNTRDCRPLTYQAAIPELRTPEELNPIIVTPPIQAIDQDRNIQPPSDRPGILYSILVGTPEDYPRFFHMHPRTAELSLLEPVNRDFHQKFDLVIKAEQDNGHPLPAFAGLHIEILDENNQSPYFTMPSYQGYILESAPVGATISDSLNLTSPLRIVALDKDIEDTKDPELHLFLNDYTSVFTVTQTGITRYLTLLQPVDREEQQTYTFSITAFDGVQESEPVIVNIQVMDANDNTPTFPEISYDVYVYTDMRPGDSVIQLTAVDADEGSNGEITYEILVGAQGDFIINKTTGLITIAPGVEMIVGRTYALTVQAADNAPPAERRNSICTVYIEVLPPNNQSPPRFPQLMYSLEISEAMRVGAVLLNLQATDREGDSITYAIENGDPQRVFNLSETTGILTLGKALDRESTDRYILIITASDGRPDGTSTATVNIVVTDVNDNAPVFDPYLPRNLSVVEEEANAFVGQVKATDPDAGINGQVHYSLGNFNNLFRITSNGSIYTAVKLNREVRDYYELVVVATDGAVHPRHSTLTLAIKVLDIDDNSPVFTNSTYTVLVEENLPAGTTILQIEAKDVDLGANVSYRIRSPEVKHFFALHPFTGELSLLRSLDYEAFPDQEASITFLVEAFDIYGTMPPGIATVTVIVKDMNDYPPVFSKRIYKGMVAPDAVKGTPITTVYAEDADPPGLPASRVRYRVDDVQFPYPASIFEVEEDSGRVITRVNLNEEPTTIFKLVVVAFDDGEPVMSSSATVKILVLHPGEIPRFTQEEYRPPPVSELATKGTMVGVISAAAINQSIVYSIVSGNEEDTFGINNITGVIYVNGPLDYETRTSYVLRVQADSLEVVLANLRVPSKSNTAKVYIEIQDENNHPPVFQKKFYIGGVSEDARMFTSVLRVKATDKDTGNYSVMAYRLIIPPIKEGKEGFVVETYTGLIKTAMLFHNMRRSYFKFQVIATDDYGKGLSGKADVLVSVVNQLDMQVIVSNVPPTLVEKKIEDLTEILDRYVQEQIPGAKVVVESIGARRHGDAFSLEDYTKCDLTVYAIDPQTNRAIDRNELFKFLDGKLLDINKDFQPYYGEGGRILEIRTPEAVTSIKKRGESLGYTEGALLALAFIIILCCIPAILVVLVSYRQVFKGRQAECTKTARIQAALPAAKPAVPAPAPVAAPPPPPPPPPGAHLYEELGDSSMYEMPQYGSRRRLLPPAGQEEYGEVVGEAEEEYEEEEWARKRMIKLVVDREYETSSTGEDSAPECQRNRLHHPSIHSNINGNIYIAQNGSVVRTRRACLTDNLKVASPVRLGGPFKKLDKLAVTHEENVPLNTLSKGPFSTEKMNARPTLVTFAPCPVGTDNTAVKPLRNRLKSTVEQESMIDSKNIKEALEFHSDHTQSDDEELWMGPWNNLHIPMTKL

SEQ ID NO: 3670 - protein, 1054 aa, Homo sapiens
MSVSLQNYSPMMAQKSQGSDNLQEGQEKSKREILKCTKSAWAPLDEWLPPDPEEESQSLTIPMLEDSKQESIQQWLDSGFFVSANENFQQVIDRTVSLYEQGMVQMTVKDYMRSLHQFSETPILSRGTSFNSCYSTASVPQSIPEWLEFWEIDPVEILLDLGFGADEPDICMQIPARFLGCGSAARGINIRVFLEAQKQRMDIENPNLYGRFRQLEILDHVTNAFSSLLSDVSILPNRAEEKAGGESVQRTSVSAAKEHRRRMGKLLRRASKQNIRRDCNPEVSESFKVKDEVFVPFTKPWDCGAELAATSINHKQNHLSLSVEHQSLQACDDLLPYPPHGLLSKQWPCSSMPAKQAPPSCVSEGSVKGRTQKENLFQTNKLKSLSHLAGKGPDSFEMEEVQSFEEETGNPLDMTSGTVGARVDRANSCQSDSSGFLEEPLEPLPLQMPSLPNSQSPAENGGRKPRDQSHSLVSSQDCQLESDGPDSKSRASMSFSSQEANALEQRASVSVMEEEFLLEAMEGPPELYIPDMACAKTTTRGECPRKDSHLWQLLPMPHAEYEVTRPTATSKYDHPLGFMVTHVTEMQDSFVRPEGAGKVQSHHNESQRSPGNDHTQDKFLHVDSEAPREEESSGFCPHTNHSLLVPESSSQCIPKHSEITPYATDLAQTSEKLIPHLHKLPGDPAQVKSRSGTLGQILPGTEAEMENLPLNTGSSRSVMTQMSSSLVSAAQRAVALGTGPRGTSLECTVCDPVTATETRLGTKARQLNDASIQTSALSNKTLTHGPQPLTKSVSLDSGFSSICPMGTCHAIPAHCCICCHHHPHCHGERQSPGPEPSVCRHCLCSLTGHQEAQFMTTLKALQDTTVRELCSCTVHEMEAMKTICQSFREYLEEIEQHLMGQQALFSRDMSEEEREEAEQLQTLREALRQQVAELEFQLGDRAQQIREGILLQLEVLTAEPPEHYSNLHQYNWIEESNGQTSCSKIHPGMAPRTVFPPDDGQEAPCSGGTQLAAFTPPTLENSTRMSPSSSAWAKLGPTPLSNCPVGEKDADVFL

SEQ ID NO: 3671 - protein, 305 aa, Homo sapiens
MAPRRARGCRTLGLPALLLLLLLRPPATRDARDRLAVLAGRSRISESFNHEVQTHEACVRLRTMENCPQCHHHRTSRQQAGITCPPPMSVEHADIWVKSYSLYSRERYICNSGFKRKAGTSSLTECVLNKATNVAHWTTPSLKCIRDPALVHQRPAPPSTVTTAGVTPQPESLSPSGKEPAASSPSSNNTAATTAAIVPGSQLMPSKSPSTGTTEISSHESSHGTPSQTTAKNWELTASASHQPPGVYPQGHSDTTGRKQHLLPDFQASFQRDCINKHIEDKECWTVASFLLFCTMFVSTCWYTL

SEQ ID NO: 3672 - protein, 543 aa, Homo sapiens
MGTSLSPNDPWPLNPLSIQQTTLLLLLSVLATVHVGQRLLRQRRRQLRSAPPGPFAWPLIGNAAAVGQAAHLSFARLARRYGDVFQIRLGSCPIVVLNGERAIHQALVQQGSAFADRPAFASFRVVSGGRSMAFGHYSEHWKVQRRAAHSMMRNFFTRQPRSRQVLEGHVLSEARELVALLVRGSADGAFLDPRPLTVVAVANVMSAVCFGCRYSHDDPEFRELLSHNEEFGRTVGAGSLVDVMPWLQYFPNPVRTVFREFEQLNRNFSNFILDKFLRHCESLRPGAAPRDMMDAFILSAEKKAAGDSHGGGARLDLENVPATITDIFGASQDTLSTALQWLLLLFTRYPDVQTRVQAELDQVVGRDRLPCMGDQPNLPYVLAFLYEAMRFSSFVPVTIPHATTANTSVLGYHIPKDTVVFVNQWSVNHDPLKWPNPENFDPARFLDKDGLINKDLTSRVMIFSVGKRRCIGEELSKMQLFLFISILAHQCDFRANPNEPAKMNFSYGLTIKPKSFKVNVTLRESMELLDSAVQNLQAKETCQ

SEQ ID NO: 3673 - protein, 1433 aa, Homo sapiens
MASGAGGVGGGGGGKIRTRRCHQGPIKPYQQGRQQHQGILSRVTESVKNIVPGWLQRYFNKNEDVCSCSTDTSEVPRWPENKEDHLVYADEESSNITDGRITPEPAVSNTEEPSTTSTASNYPDVLTRPSLHRSHLNFSMLESPALHCQPSTSSAFPIGSSGFSLVKEIKDSTSQHDDDNISTTSGFSSRASDKDITVSKNTSLPPLWSPEAERSHSLSQHTATSSKKPAFNLSAFGTLSPSLGNSSILKTSQLGDSPFYPGKTTYGGAAAAVRQSKLRNTPYQAPVRRQMKAKQLSAQSYGVTSSTARRILQSLEKMSSPLADAKRIPSIVSSPLNSPLDRSGIDITDFQAKREKVDSQYPPVQRLMTPKPVSIATNRSVYFKPSLTPSGEFRKTNQRIDNKCSTGYEKNMTPGQNREQRESGFSYPNFSLPAANGLSSGVGGGGGKMRRERTRFVASKPLEEEEMEVPVLPKISLPITSSSLPTFNFSSPEITTSSPSPINSSQALTNKVQMTSPSSTGSPMFKFSSPIVKSTEANVLPPSSIGFTFSVPVAKTAELSGSSSTLEPIISSSGFASPKIDSVAAQPTATSPVVYTRPAISSFSSSGIGFGESLKAGSSWQCDTCLLQNKVTDNKCIACQAAKLSPRDTAKQTGIETPNKSGKTTLSASGTGFGDKFKPVIGTWDCDTCLVQNKPEAIKCVACETPKPGTCVKRALTLTVVSESAETMTASSSSCTVTTGTLGFGDKFKRPIGSWECSVCCVSNNAEDNKCVSCMSEKPGSSVPASSSSTVPVSLPSGGSLGLEKFKKPEGSWDCELCLVQNKADSTKCLACESAKPGTKSGFKGFDTSSSSSNSAASSSFKFGVSSSSSGPSQTLTSTGNFKFGDQGGFKIGVSSDSGSINPMSEGFKFSKPIGDFKFGVSSESKPEEVKKDSKNDNFKFGLSSGLSNPVSLTPFQFGVSNLGQEEKKEELPKSSSAGFSFGTGVINSTPAPANTIVTSENKSSFNLGTIETKSASVAPFTCKTSEAKKEEMPATKGGFSFGNVEPASLPSASVFVLGRTEEKQQEPVTSTSLVFGKKADNEEPKCQPVFSFGNSEQTKDENSSKSTFSFSMTKPSEKESEQPAKATFAFGAQTSTTADQGAAKPVFSFLNNSSSSSSTPATSAGGGIFGSSTSSSNPPVATFVFGQSSNPVSSSAFGNTAESSTSQSLLFSQDSKLATTSSTGTAVTPFVFGPGASSNNTTTSGFGFGATTTSSSAGSSFVFGTGPSAPSASPAFGANQTPTFGQSQGASQPNPPGFGSISSSTALFPTGSQPAPPTFGTVSSSSQPPVFGQQPSQSAFGSGTTPNSSSAFQFGSSTTNFNFTNNSPSGVFTFGANSSTPAASAQPSGSGGFPFNQSPAAFTVGSNGKNVFSSSGTSFSGRKIKTAVRRRK

SEQ ID NO: 3674 - protein, 228 aa, Homo sapiens
MKPKMKYSTNKISTAKWKNTASKALCFKLGKSQQKAKEVCPMYFMKLRSGLMIKKEACYFRRETTKRPSLKTGISPITEYLASLSTYNDQSITFALEDESYEIYVEDLKKDEKKDKVLLSYYESQHPSNESGDGVDGKMLMVTLSPTKDFWLHANNKEHSVELHKCEKPLPDQAFFVLHNMHSNCVSFECKTDPGVFIGVKDNHLALIKVDSSENLCTENILFKLSET

SEQ ID NO: 3675 - protein, 606 aa, Homo sapiens
MIQSDKGADPPDKKDMKLSTATNPQNGLSQILRLVLQELSLFYGRDVNGVCLLYDLLHSPWLQALLKIYDCLQEFKEKKLVPATPHAQVLSYEVVELLRETPTSPEIQELRQMLQAPHFKALLSAHDTIAQKDFEPLLPPLPDNIPESEEAMRIVCLVKNQQPLGATIKRHEMTGDILVARIIHGGLAERSGLLYAGDKLVEVNGVSVEGLDPEQVIHILAMSRGTIMFKVVPVSDPPVNSQQMVYVRAMTEYWPQEDPDIPCMDAGLPFQKGDILQIVDQNDALWWQARKISDPATCAGLVPSNHLLKRKQREFWWSQPYQPHTCLKSTLYKEEFVGYGQKFFIAGFRRSMRLCRRKSHLSPLHASVCCTGSCYSAVGAPYEEVVRYQRRPSDKYRLIVLMGPSGVGVNELRRQLIEFNPSHFQSAVPHTTRTKKSYEMNGREYHYVSKETFENLIYSHRMLEYGEYKGHLYGTSVDAVQTVLVEGKICVMDLEPQDIQGVRTHELKPYVIFIKPSNMRCMKQSRKNAKVITDYYVDMKFKDEDLQEMENLAQRMETQFGQFFDHVIVNDSLHDACAQLLSAIQKAQEEPQWVPATWISSDTESQ

SEQ ID NO: 3676 - protein, 612 aa, Homo sapiens
MSHPSWLPPKSTGEPLGHVPARMETTHSFGNPSISVSTQQPPKKFAPVVAPKPKYNPYKQPGGEGDFLPPPPPPLDDSSALPSISGNFPPPPPLDEEAFKVQGNPGGKTLEERRSSLDAEIDSLTSILADLECSSPYKPRPPQSSTGSTASPPVSTPVTGHKRMVIPNQPPLTATKKSTLKPQPAPQAGPIPVAPIGTLKPQPQPVPASYTTASTSSRPTFNVQVKSAQPSPHYMAAPSSGQIYGSGPQGYNTQPVPVSGQCPPPSTRGGMDYAYIPPPGLQPEPGYGYAPNQGRYYEGYYAAGPGYGGRNDSDPTYGQQGHPNTWKREPGYTPPGAGNQNPPGMYPVTGPKKTYITDPVSAPCAPPLQPKGGHSGQLGPSSVAPSFRPEDELEHLTKKMLYDMENPPADEYFGRCARCGENVVGEGTGCTAMDQVFHVDCFTCIICNNKLRGQPFYAVEKKAYCEPCYINTLEQCNVCSKPIMERILRATGKAYHPHCFTCVMCHRSLDGIPFTVDAGGLIHCIEDFHKKFAPRCSVCKEPIMPAPGQEETVRIVALDRDFHVHCYRCEDCGGLLSEGDNQGCYPLDGHILCKTCNSARIRVLTAKASTDL

SEQ ID NO: 3677 - protein, 477 aa, Homo sapiens
MGRAGGGGPGRGPPPLLLFLGAALVLASGAVPAREAGSAVEAEELVKGSPAWEPPANDTREEAGPPAAGEDEASWTAPGGELAGPEEVLQESAAVTGTAWLEADSPGLGGVTAEAGSGDAQALPATLQAPHEVLGQSIMPPAIPEATEASGPPSPTPGDKLSPASELPKESPLEVWLNLGGSTPDPQGPELTYPFQGTLEPQPASDIIDIDYFEGLDGEGRGADLGSFPGSPGTSENHPDTEGETPSWSLLDLYDDFTPFDESDFYPTTSFYDDLDEEEEEEEDDKDAVGGGDLEDENELLVPTGKPGLGPGTGQPTSRWHAVPPQHTLGSVPGSSIALRPRPGEPGRDLASSENGTECRSGFVRHNGSCRSVCDLFPSYCHNGGQCYLVENIGAFCRCNTQDYIWHKGMRCESIITDFQVMCVAVGSAALVLLLLFMMTVFFAKKLYLLKTENTKLRRTKMILVLPTKSRRFSSPA

SEQ ID NO: 3678 - protein, 189 aa, Homo sapiens
MAAALFVLLGFALLGTHGASGAGPPRVKAVKSSEHINEGETAMLVCKSESVPPVTDWAWYKITDSEDKALMNGSESRFFVSSSQGRSELHIENLNMEADPGQYRCNGTSSKGSDQAIITLRVRSHLAALWPFLGIVAEVLVLVTIIFIYEKRRKPEDVLDDDDAGSAPLKSSGQHQNDKGKNVRQRNSS

SEQ ID NO: 3679 - protein, 130 aa, Homo sapiens
MKLAFLFLGPMALLLLAGYGCVLGASSGNLRTFVGCAVREFTFLAKKPGCRGLRITTDACWGRCETWEKPILEPPYIEAHHRVCTYNETKQVTVKLPNCAPGVDPFYTYPVAIRCDCGACSTATTECETI

SEQ ID NO: 3680 - protein, 336 aa, Homo sapiens
MDCVGWPPGRKWHLEKNTSCGGSSGICASYVTQMADDQGCIEEQGVEDSANEDSVDAKPDRSSFVPSLFSKKKKNVTMRSIKTTRDRVPTYQYNMNFEKLGKCIIINNKNFDKVTGMGVRNGTDKDAEALFKCFRSLGFDVIVYNDCSCAKMQDLLKKASEEDHTNAACFACILLSHGEENVIYGKDGVTPIKDLTAHFRGDRCKTLLEKPKLFFIQACRGTELDDGIQADSGPINDTDANPRYKIPVEADFLFAYSTVPGYYSWRSPGRGSWFVQALCSILEEHGKDLEIMQILTRVNDRVARHFESQSDDPHFHEKKQIPCVVSMLTKELYFSQ

SEQ ID NO: 3681 - protein, 1538 aa, Homo sapiens
MQRTQPRPCYLNAPQQCPGAERPGRPTAGSHSFLLRPGPLAGSSPFALLDPLQAFEQFVWVRSQARAGLLRLRQGSHAVTRCRPLPVRREGRRDGSPWRSVVCRYCRCSRQTGASVTTVSLPSSSSSPGLDPRGPRQASVRSLRSEPVLLFLPFRTPYRDSEEGKREGLSRLRAVCRRAGPRGRGSFSPRDARASPRLHFLVAAVTTGAASRRQRGARVRQPSPSSSRRAKRLRECERRSLHAPPAMDASYDGTEVTVVMEEIEEAYCYTSPGPPKKKKKYKIHGEKTKKPRSAYLLYYYDIYLKVQQELPHLPQSEINKKISESWRLLSVAERSYYLEKAKLEKEGLDPNSKLSALTAVVPDIPGFRKILPRSDYIIIPKSSLQEDRSCPQLELCVAQNQMSPKGPPLVSNTAPETVPSHAGMAEQCLAVEALAEEVGALTQSGAVQEIATSEILSQDVLLEDASLEVGESHQPYQTSLVIEETLVNGSPDLPTGSLAVPHPQVGESVSVVTVMRDSSESSSSAPATQFIMLPLPAYSVVENPTSIKLTTTYTRRGHGTCTSPGCSFTYVTRHKPPKCPTCGNFLGGKWIPKEKPAKVKVELASGVSSKGSVVKRNQQPVTTEQNSSKENASKLTLENSEAVSQLLNVAPPREVGEESEWEEVIISDAHVLVKEAPGNCGTAVTKTPVVKSGVQPEVTLGTTDNDSPGADVPTPSEGTSTSSPLPAPKKPTGADLLTPGSRAPELKGRARGKPSLLAAARPMRAILPAPVNVGRGSSMGLPRARQAFSLSDKTPSVRTCGLKPSTLKQLGQPIQQPSGPGEVKLPSGPSNRTSQVKVVEVKPDMFPPYKYSCTVTLDLGLATSRGRGKCKNPSCSYVYTNRHKPRICPSCGVNLAKDRTEKTTKAIEVSSPLPDVLNATEPLSTAQREIQRQSTLQLLRKVLQIPENESELAEVFALIHELNSSRLILSNVSEETVTIEQTSWSNYYESPSTQCLLCSSPLFKGGQNSLAGPQECWLLTASRLQTVTAQVKMCLNPHCLALHSFIDIYTGLFNVGNKLLVSLDLLFAIRNQIKLGEDPRVSINVVLKSVQEQTEKTLTSEELSQLQELLCNGYWAFECLTVRDYNDMICGICGVAPKVEMAQRSEENVLALKSVEFTWPEFLGSNEVNVEDFWATMETEVIEQVAFPASIPITKFDASVIAPFFPPLMRGAVVVNTEKDKNLDVQPVPGSGSALVRLLQEGTCKLDEIGSYSEEKLQHLLRQCGIPFGAEDSKDQLCFSLLALYESVQNGARAIRPPRHFTGGKIYKVCPHQVVCGSKYLVRGESARDHVDLLASSRHWPPVYVVDMATSVALCADLCYPELTNQMWGRNQGCFSSPTEPPVSVSCPELLDQHYTVDMTETEHSIQHPVTKTATRRIVHAGLQPNPGDPSAGHHSLALCPELAPYATILASIVDSKPNGVRQRPIAFDNATHYYLYNRLMDFLTSREIVNRQIHDIVQSCQPGEVVIRDTLYRLGVAQIKTETEEEGEEEEVAAVAE

SEQ ID NO: 3682 - protein, 581 aa, Homo sapiens; identical to SEQ ID NO: 2431

SEQ ID NO: 3683 - protein, 1419 aa, Homo sapiens
MEGTHCTLQLHKPITELCYISFCLPKGEVRGFSYKGTVTLDRSNKGFHNCYQVREESDIISLSQEPDEHPGDIFFKQTPTKDILTELYKLTTERERLLTNLLSSDHILGITMGNQEGKLQELSVSLAPEDDCFQSAGDWQGELPVGPLNKRSTHGNKKPRRSSGRRESFGALPQKRTKRKGRGGRESAPLMGKDKICSSHSLPLSRTRPNLWVLEEKGNLLPNGALACSLQRRESCPPDIPKTPDTDLGFGSFETAFKDTGLGREVLPPDCSSTEAGGDGIRRPPSGLEHQQTGLSESHQDPEKHPEAEKDEMEKPAKRTCKQKPVSKVVAKVQDLSSQVQRVVKTHSKGKETIAIRPAAHAEFVPKADLLTLPGAEAGAHGSRRQGKERQGDRSSQSPAGETASISSVSASAEGAVNKVPLKVIESEKLDEAPEGKRLGFPVHTSVPHTRPETRNKRRAGLPLGGHKSLFLDLPHKVGPDSSQPRGDKKKPSPPAPAALGKVFNNSASQSSTHKQTSPVPSPLSPRLPSPQQHHRILRLPALPGEREAALNDSPCRKSRVFSGCVSADTLEPPSSAKVTETKGASPAFLRAGQPRLVPGETLEKSLGPGKTTAEPQHQSPPGISSEGFPWDGFNEQTPKDLPNRDGGAWVLGYRAGPACPFLLHEEREKSNRSELYLDLHPDHSLTEQDDRTPGRLQAVWPPPKTKDTEEKVGLKYTEAEYQAAILHLKREHKEEIENLQAQFELRAFHIRGEHAMITARLEETIENLKHELEHRWRGGCEERKDVCISTDDDCPPKTFRNVCVQTDRETFLKPCESESKTTRSNQLVPKKLNISSLSQLSPPNDHKDIHAALQPMEGMASNQQKALPPPPASIPPPPPLPSGLGSLSPAPPMPPVSAGPPLPPPPPPPPPLPPPSSAGPPPPPPPPPLPNSPAPPNPGGPPPAPPPPGLAPPPPPGLFFGLGSSSSQCPRKPAIEPSCPMKPLYWTRIQISDRSQNATPTLWDSLEEPDIRDPSEFEYLFSKDTTQQKKKPLSETYEKKNKVKKIIKLLDGKRSQTVGILISSLHLEMKDIQQAIFNVDDSVVDLETLAALYENRAQEDELVKIRKYYETSKEEELKLLDKPEQFLHELAQIPNFAERAQCIIFRSVFSEGITSLHRKVEIITRASKDLLHVKSVKDILALILAFGNYMNGGNRTRGQADGYSLEILPKLKDVKSRDNGINLVDYVVKYYLRYYDQEAGTEKSVFPLPEPQDFFLASQVKFEDLIKDLRKLKRQLEASEKQMVVVCKESPKEYLQPFKDKLEEFFQKAKKEHKMEESHLENAQKSFETTVRYFGMKPKSGEKEITPSYVFMVWYEFCSDFKTIWKRESKNISKERLKMAQESVSKLTSEKKVETKKINPTASLKERLRQKEASVTTN

SEQ ID NO: 3684 - protein, 3680 aa, Homo sapiens
MSEVSSDEREDVQKKTFTKWVNAQFSKFGKQHIENLFSDLQDGRRLLDLLEGLTGQKLPKEKGSTRVHALNNVNKALRVLQNNNVDLVNIGSTDIVDGNHKLTLGLIWNIILHWQVKNVMKNIMAGLQQTNSEKILLSWVRQSTRNYPQVNVINFTTSWSDGLALNALIHSHRPDLFDWNSVVCQQSATQRLEHAFNIARYQLGIEKLLDPEDVDTTYPDKKSILMYITSLFQVLPQQVSIEAIQEVEMLPRPPKVTKEEHFQLHHQMHYSQQITVSLAQGYERTSSPKPRFKSYAYTQAAYVTTSDPTRSPFPSQHLEAPEDKSFGSSLMESEVNLDRYQTALEEVLSWLLSAEDTLQAQGEISNDVEVVKDQFHTHEGYMMDLTAHQGRVGNILQLGSKLIGTGKLSEDEETEVQEQMNLLNSRWECLRVASMEKQSNLHRVLMDLQNQKLKELNDWLTKTEERTRKMEEEPLGPDLEDLKRQVQQHKVLQEDLEQEQVRVNSLTHMVVVVDESSGDHATAALEEQLKVLGDRWANICRWTEDRWVLLQDILLKWQRLTEEQCLFSAWLSEKEDAVNKIHTTGFKDQNEMLSSLQKLAVLKADLEKKKQSMGKLYSLKQDLLSTLKNKSVTQKTEAWLDNFARCWDNLVQKLEKSTAQISQAVTTTQPSLTQTTVMETVTTVTTREQILVKHAQEELPPPPPQKKRQITVDSEIRKRLDVDITELHSWITRSEAVLQSPEFAIFRKEGNFSDLKEKVNAIEREKAEKFRKLQDASRSAQALVEQMVNEGVNADSIKQASEQLNSRWIEFCQLLSERLNWLEYQNNIIAFYNQLQQLEQMTTTAENWLKIQPTTPSEPTAIKSQLKICKDEVNRLSDLQPQIERLKIQSIALKEKGQGPMFLDADFVAFTNHFKQVFSDVQAREKELQTIFDTLPPMRYQETMSAIRTWVQQSETKLSIPQLSVTDYEIMEQRLGELQALQSSLQEQQSGLYYLSTTVKEMSKKAPSEISRKYQSEFEEIEGRWKKLSSQLVEHCQKLEEQMNKLRKIQNHIQTLKKWMAEVDVFLKEEWPALGDSEILKKQLKQCRLLVSDIQTIQPSLNSVNEGGQKIKNEAEPEFASRLETELKELNTQWDHMCQQVYARKEALKGGLEKTVSLQKDLSEMHEWMTQAEEEYLERDFEYKTPDELQKAVEEMKRAKEEAQQKEAKVKLLTESVNSVIAQAPPVAQEALKKELETLTTNYQWLCTRLNGKCKTLEEVWACWHELLSYLEKANKWLNEVEFKLKTTENIPGGAEEISEVLDSLENLMRHSEDNPNQIRILAQTLTDGGVMDELINEELETFNSRWRELHEEAVRRQKLLEQSIQSAQETEKSLHLIQESLTFIDKQLAAYIADKVDAAQMPQEAQKIQSDLTSHEISLEEMKKHNQGKEAAQRVLSQIDVAQKKLQDVSMKFRLFQKPANFEQRLQESKMILDEVKMHLPALETKSVEQEVVQSQLNHCVNLYKSLSEVKSEVEMVIKTGRQIVQKKQTENPKELDERVTALKLHYNELGAKVTERKQQLEKCLKLSRKMRKEMNVLTEWLAATDMELTKRSAVEGMPSNLDSEVAWGKATQKEIEKQKVHLKSITEVGEALKTVLGKKETLVEDKLSLLNSNWIAVTSRAEEWLNLLLEYQKHMETFDQNVDHITKWIIQADTLLDESEKKKPQQKEDVLKRLKAELNDIRPKVDSTRDQAANLMANRGDHCRKLVEPQISELNHRFAAISHRIKTGKASIPLKELEQFNSDIQKLLEPLEAEIQQGVNLKEEDFNKDMNEDNEGTVKELLQRGDNLQQRITDERKREEIKIKQQLLQTKHNALKDLRSQRRKKALEISHQWYQYKRQADDLLKCLDDIEKKLASLPEPRDERKIKEIDRELQKKKEELNAVRRQAEGLSEDGAAMAVEPTQIQLSKRWREIESKFAQFRRLNFAQIHTVREETMMVMTEDMPLEISYVPSTYLTEITHVSQALLEVEQLLNAPDLCAKDFEDLFKQEESLKNIKDSLQQSSGRIDIIHSKKTAALQSATPVERVKLQEALSQLDFQWEKVNKMYKDRQGRFDRSVEKWRRFHYDIKIFNQWLTEAEQFLRKTQIPENWEHAKYKWYLKVSLFVFSKHTFCLQRQKTGEEIIQQSSKTDASILQEKLGSLNLRWQEVCKQLSDRKKRLEEQKNILSEFQRDLNEFVLWLEEADNIASIPLEPGKEQQLKEKLEQVKLLVEELPLRQGILKQLNETGGPVLVSAPISPEEQDKLENKLKQTNLQWIKVSRALPEKQGEIEAQIKDLGQLEKKLEDLEEQLNHLLLWLSPIRNQLEIYNQPNQEGPFDVKETEIAVQAKQPDVEEILSKGQHLYKEKPATQPVKRKLEDLSSEWKAVNRLLQELRAKQPDLAPGLTTIGASPTQTVTLVTQPVVTKETAISKLEMPSSLMLEVPALADFNRAWTELTDWLSLLDQVIKSQRVMVGDLEDINEMIIKQKATMQDLEQRRPQLEELITAAQNLKNKTSNQEARTIITDRIERIQNQWDEVQEHLQNRRQQLNEMLKDSTQWLEAKEEAEQVLGQARAKLESWKEGPYTVDAIQKKITETKQLAKDLRQWQTNVDVANDLALKLLRDYSADDTRKVHMITENINASWRSIHKRVSEREAALEETHRLLQQFPLDLEKFLAWLTEAETTANVLQDATRKERLLEDSKGVKELMKQWQDLQGEIEAHTDVYHNLDENSQKILRSLEGSDDAVLLQRRLDNMNFKWSELRKKSLNIRSHLEASSDQWKRLHLSLQELLVWLQLKDDELSRQAPIGGDFPAVQKQNDVHRAFKRELKTKEPVIMSTLETVRIFLTEQPLEGLEKLYQEPRELPPEERAQNVTRLLRKQAEEVNTEWEKLNLHSADWQRKIDETLERLRELQEATDELDLKLRQAEVIKGSWQPVGDLLIDSLQDHLEKVKALRGEIAPLKENVSHVNDLARQLTTLGIQLSPYNLSTLEDLNTRWKLLQVAVEDRVRQLHEAHRDFGPASQHFLSTSVQGPWERAISPNKVPYYINHETQTTCWDHPKMTELYQSLADLNNVRFSAYRTAMKLRRLQKALCLDLLSLSAACDALDQHNLKQNDQPMDILQIINCLTTIYDRLEQEHNNLVNVPLCVDMCLNWLLNVYDTGRTGRIRVLSFKTGIISLCKAHLEDKYRYLFKQVASSTGFCDQRRLGLLLHDSIQIPRQLGEVASFGGSNIEPSVRSCFQFANNKPEIEAALFLDWMRLEPQSMVWLPVLHRVAAAETAKHQAKCNICKECPIIGFRYRSLKHFNYDICQSCFFSGRVAKGHKMHYPMVEYCTPTTSGEDVRDFAKVLKNKFRTKRYFAKHPRMGYLPVQTVLEGDNMETPVTLINFWPVDSAPASSPQLSHDDTHSRIEHYASRLAEMENSNGSYLNDSISPNESIDDEHLLIQHYCQSLNQDSPLSQPRSPAQILISLESEERGELERILADLEEENRNLQAEYDRLKQQHEHKGLSPLPSPPEMMPTSPQSPRDAELIAEAKLLRQHKGRLEARMQILEDHNKQLESQLHRLRQLLEQPQAEAKVNGTTVSSPSTSLQRSDSSQPMLLRVVGSQTSDSMGEEDLLSPPQDTSTGLEEVMEQLNNSFPSSRGRNTPGKPMREDTM

SEQ ID NO: 3685 - protein, 1342 aa, Homo sapiens
MKPAAREARLPPRSPGLRWALPLLLLLLRLGQILCAGGTPSPIPDPSVATVATGENGITQISSTAESFHKQNGTGTPQVETNTSEDGESSGANDSLRTPEQGSNGTDGASQKTPSSTGPSPVFDIKAVSISPTNVILTWKSNDTAASEYKYVVKHKMENEKTITVVHQPWCNITGLRPATSYVFSITPGIGNETWGDPRVIKVITEPIPVSDLRVALTGVRKAALSWSNGNGTASCRVLLESIGSHEELTQDSRLQVNISGLKPGVQYNINPYLLQSNKTKGDPLGTEGGLDASNTERSRAGSPTAPVHDESLVGPVDPSSGQQSRDTEVLLVGLEPGTRYNATVYSQAANGTEGQPQAIEFRTNAIQVFDVTAVNISATSLTLIWKVSDNESSSNYTYKIHVAGETDSSNLNVSEPRAVIPGLRSSTFYNITVCPVLGDIEGTPGFLQVHTPPVPVSDFRVTVVSTTEIGLAWSSHDAESFQMHITQEGAGNSRVEITTNQSIIIGGLFPGTKYCFEIVPKGPNGTEGASRTVCNRTVPSAVFDIHVVYVTTTEMWLDWKSPDGASEYVYHLVIESKHGSNHTSTYDKAITLQGLIPGTLYNITISPEVDHVWGDPNSTAQYTRPSNVSNIDVSTNTTAATLSWQNFDDASPTYSYCLLIEKAGNSSNATQVVTDIGITDATVTELIPGSSYTVEIFAQVGDGIKSLEPGRKSFCTDPASMASFDCEVVPKEPALVLKWTCPPGANAGFELEVSSGAWNNATHLESCSSENGTEYRTEVTYLNFSTSYNISITTVSCGKMAAPTRNTCTTGITDPPPPDGSPNITSVSHNSVKVKFSGFEASHGPIKAYAVILTTGEAGHPSADVLKYTYEDFKKGASDTYVTYLIRTEEKGRSQSLSEVLKYEIDVGNESTTLGYYNGKLEPLGSYRCLLRACVAGFTNITFHPQNKGLIDGAESYVSFSRYSDAVSLPQDPGVICGAVFGCIFGALVIVTVGGFIFWRKKRKDAKNNEVSFSQIKSLKRSKLIRVENFEAYFKKQQADSNCGFAEEYEDLKLVGISQPKYAAELAENRGKNRYNNVLPYDISRVKLSVQTHSTDDYINANYMPGYHSKKDFIATQGPLPNTLKDFWRMVWEKNVYAIIMLTKCVEQGRTKCEEYWPSKQAQDYGDITVAMTSEIVLPEWTIRDFTVKNIQTSESHPLRQFHFTSWPDHGVPDTTDLLINFRYLVRDYMKQSPPESPILVHCSAGVGRTGTFIAIDRLIYQIENENTVDVYGIVYDLRMHRPLMVQTEDQYVFLNQCVLDIVRSQKDSKVDLIYQNTTAMTIYENLAPVTTFGKTNGYIA

SEQ ID NO: 3686 - protein, 1239 aa, Homo sapiens
MDEIEKYQEVEEDQDPSCPRLSRELLDEKEPEVLQDSLDRCYSTPSGYLELPDLGQPYSSAVYSLEEQYLGLALDVDRIKKDQEEEEDQGPPCPRLSRELLEVVEPEVLQDSLDRCYSTPSSCLEQPDSCQPYGSSFYALEEKHVGFSLDVGEIEKKGKGKKRRGRRSKKERRRGRKEGEEDQNPPCPRLSRELLDEKGPEVLQDSLDRCYSTPSGCLELTDSCQPYRSAFYVLEQQHVGLAVDMDEIEKYQEVEEDQDPSCPRLSRELLDEKEPEVLQDSLDRCYSTPSGYLELPDLGQPYSSAVYSLEEQYLGLALDVDRIKKDQEEEEDQGPPCPRLSRELLEVVEPEVLQDSLDRCYSTPSSCLEQPDSCQPYGSSFYALEEKHVGFSLDVGEIEKKGKGKKRRGRRSKKERRRGRKEGEEDQNPPCPRLSRELLDEKGPEVLQDSLDRCYSTPSGCLELTDSCQPYRSAFYVLEQQHVGLAVDMDEIEKYQEVEEDQDPSCPRLSRELLDEKEPEVLQDSLDRCYSTPSGYLELPDLGQPYSSAVYSLEEQYLGLALDVDRIKKDEEEEEDQDPPCPRLSRELLEVVEPEVLQDSLDRCYSTPSSCLEQPDSCQPYGSSFYALEEKHVGFSLDVGEIEKKGKGKKRRGRRSKKERRRGRKEGEEDQNPPCPRVSFDSLTSMSPGQFTRSLSLCLCLCLCLSFSFIVFYLALFCPNIKAIISGAVWFLIPPGLFFTFSHFSRLSRELLDEKGPEVLQDSLDRCYSTPSGYLELTDSCQPYRSAFYVLEQQHVGLAVDMDEIEKYQEVEEDQDPSCPRLSRELLDEKEPEVLQDSLDRCYSTPSGYLELPDLGQPYSSAVYSLEEQYLGLALDVDRIKKDQEEEEDQGPPCPRLSRELLEVVEPEVLQDSLDRCYSTPSSCLEQPDSCQPYGSSFYALEEKHVGFSLDVGEIEKKGKGKKRRGRRSKKERRRGRKEGEEDQNPPCPRLSRELLDEKGPEVLQDSLDRCYSTPSGCLELCDSCQPYRSAFYVLEQQRVGLAVDMDEIEKYQEVEEDQDPSCPRLSRELLDEKEPEVLQDSLDRCYSTPSGYLELPDLGQPYSSAVYSLEEQYLGLALDVDKIEKKGKGKKRRGRRSKKERRRGRKEGEEDQNPPCPRLNGVLMEVEEREVLQDSLDRCYSTPSMYFELPDSFQHYRSVFYSFEEQHISFALYVDNRFFTLTVTSLHLVFQMGVIFPQ

SEQ ID NO: 3687 - protein, 457 aa, Homo sapiens
MAGPAPPAADELPGPAARRLYSRMEASCLELALEGERLCKAGDFKTGVAFFEAAVQVGTEDLKTLSAIYSQLGNAYFYLKEHGRALEYHKHDLLLARTIGDRMGEAKASGNLGNTLKVLGRFDEAAVCCQRHLSIAQEQGDKVGEARALYNIGNVYHAKGKQLSWNAANATQDPGHLPPDVRETLCKASEFYERNLSLVKELGDRAAQGRAYGNLGNTHYLLGNFTEATTFHKERLAIAKEFGDKAAERRAYSNLGNAHVFLGRFDVAAEYYKKTLQLSRQLRDQAVEAQACYSLGNTYTLLQDYERAAEYHLRHLLIAQELADRVGEGRACWSLGNAYVSMGRPAQALTFAKKHLQISQEIGDRHGELTARMNVAQLQLVLGRLTSPAASEKPDLAGYEAQGEFQGCGGVLLPTGTDRIRSCGGVGSRPGQHGGGGSRQKMAPTSQFFLASGTAQA

SEQ ID NO: 3688 - protein, 2240 aa, Homo sapiens
MEQTWTRDYFAEDDGEMVPRTSHTAAFLSDTKDRGPPVQSQIWRSGEKVPFVQTYSLRAFEKPPQVQTQALRDFEKHLNDLKKENFSLKLRIYFLEERMQQKYEASREDIYKRNIELKVEVESLKRELQDKKQHLDKTWADVENLNSQNEAELRRQFEERQQETEHVYELLENKIQLLQEESRLAKNEAARMAALVEAEKECNLELSEKLKGVTKNWEDVPGDQVKPDQYTEALAQRDKRIEELNQSLAAQERLVEQLSREKQQLLHLLEEPTSMEVQPMTEELLKQQKLNSHETTITQQSVSDSHLAELQEKIQQTEATNKILQEKLNEMSYELKCAQESSQKQDGTIQNLKETLKSRERETEELYQVIEGQNDTMAKLREMLHQSQLGQLHSSEGTSPAQQQVALLDLQSALFCSQLEIQKLQRVVRQKERQLADAKQCVQFVEAAAHESEQQKEASWKHNQELRKALQQLQEELQNKSQQLRAWEAEKYNEIRTQEQNIQHLNHSLSHKEQLLQEFRELLQYRDNSDKTLEANEMLLEKLRQRIHDKAVALERAIDEKFSALEEKEKELRQLRLAVRERDHDLERLRDVLSSNEATMQSMESLLRAKGLEVEQLSTTCQNLQWLKEEMETKFSRWQKEQESIIQQLQTSLHDRNKEVEDLSATLLCKLGPGQSEIAEELCQRLQRKERMLQDLLSDRNKQVLEHEMEIQGLLQSVSTREQESQAAAEKLVQALMERNSELQALRQYLGGRDSLMSQAPISNQQAEVTPTGRLGKQTDQGSMQIPSRDDSTSLTAKEDVSIPRSTLGDLDTVAGLEKELSNAKEELELMAKKERESQMELSALQSMMAVQEEELQVQAADMESLTRNIQIKEDLIKDLQMQLVDPEDIPAMERLTQEVLLLREKVASVESQGQEISGNRRQQLLLMLEGLVDERSRLNEALQAERQLYSSLVKFHAHPESSERDRTLQVELEGAQVLRSRLEEVLGRSLERLNRLETLAAIGGAAAGDDTEDTSTEFTDSIEEEAAHHSHQQLVKVALEKSLATVETQNPSFSPPSPMGGDSNRCLQEEMLHLRAEFHQHLEEKRKAEEELKELKAQIEEAGFSSVSHIRNTMLSLCLENAELKEQMGEAMSDGWEIEEDKEKGELDNQSQPRDPGPQSAFSLPGSTQHLRSQLSQCKQRYQDLQEKLLLSEATVFAQANELEKYRVMLTGESLVKQDSKQIQVDLQDLGYETCGRSENEAEREETTSPECEEHNSLKEMVLMEGLCSEQGRRGSTLASSSERKPLENQLGKQEEFRVYGKSENILVLRKDIKDLKAQLQNANKVIQNLKSRVRSLSVTSDYSSSLERPRKLRAVGTLEGSSPHSVPDEDEGWLSDGTGAFYSPGLQAKKDLESLIQRVSQLEAQLPKNGLEEKLAEELRSASWPGKYDSLIQDQARELSYLRQKIREGRGICYLITRHAKDTVKSFEDLLRSNDIDYYLGQSFREQLAQGSQLTERLTSKLSTKDHKSEKDQAGLEPLALRLSRELQEKEKVIEVLQAKLDARSLTPSSSHALSDSHRSPSSTSFLSDELEACSDMDIVSEYTHYEEKKASPSHSDSIHHSSHSAVLSSKPSSTSASQGAKAESNSNPISLPTPQNTPKEANQAHSGASTVPPASTATLLSNDLEADSSYYLNSAQPHSPPRGTIELGRILEPGYLGSSGKWDVMRPQKGSVSGDLSSGSSVYQLNSKPTGADLLEEHLGEIRNLRQRLEESICINDRLREQLEHRLTSTARGRGSTSNFYSQGLESIPQLCNENRVLREDNRRLQAQLSHVSREHSQETESLREALLSSRSHLQELEKELEHQKVERQQLLEDLREKQQEVLHFREERLSLQENDSRLQHKLVLLQQQCEEKQQLFESLQSELQIYEALYGNSKKGLKAYSLDACHQIPLSSDLSHLVAEVRALRGQLEQSIQGNNCLRLQLQQQLESGAGKASLSPSSINQNFPASTDPGNKQLLLQDSAVSPPVRDVGMNSPALVFPSSASSTPGSETPIINRANGLGLDTSPVMKTPPKLEGDATDGSFANKHGRHVIGHIDDYSALRQQIAEGKLLVKKIVSLVRSACSFPGLEAQGTEVLGSKGIHELRSSTSALHHALEESASLLTMFWRAALPSTHIPVLPGKVGESTERELLELRTKVSKQERLLQSTTEHLKNANQQKESMEQFIVSQLTRTHDVLKKARTNLEVKSLRALPCTPAL

SEQ ID NO: 3689 - protein, 60 aa, Homo sapiens
MRLTGPWKLWLWMSIFLLPASTSVTVRDKTGIQANSLPNHQMLFIAFKSLKQILLRLKRP

SEQ ID NO: 3690 - protein, 956 aa, Homo sapiens
MPPRAPPAPGPRPPPRAAAATDTAAGAGGAGGAGGAGGPGFRPLAPRPWRWLLLLALPAACSAPPPRPVYTNHWAVQVLGGPAEADRVAAAHGYLNLGQIGNLEDYYHFYHSKTFKRSTLSSRGPHTFLRMDPQVKWLQQQEVKRRVKRQVRSDPQALYFNDPIWSNMWYLHCGDKNSRCRSEMNVQAAWKRGYTGKNVVVTILDDGIERNHPDLAPNYDSYASYDVNGNDYDPSPRYDASNENKHGTRCAGEVAASANNSYCIVGIAYNAKIGGIRMLDGDVTDVVEAKSLGIRPNYIDIYSASWGPDDDGKTVDGPGRLAKQAFEYGIKKGRQGLGSIFVWASGNGGREGDYCSCDGYTNSIYTISVSSATENGYKPWYLEECASTLATTYSSGAFYERKIVTTDLRQRCTDGHTGTSVSAPMVAGIIALALEANSQLTWRDVQHLLVKTSRPAHLKASDWKVNGAGHKVSHFYGFGLVDAEALVVEAKKWTAVPSQHMCVAASDKRPRSIPLVQVLRTTALTSACAEHSDQRVVYLEHVVVRTSISHPRRGDLQIYLVSPSGTKSQLLAKRLLDLSNEGFTNWEFMTVHCWGEKAEGQWTLEIQDLPSQVRNPEKQGKLKEWSLILYGTAEHPYHTFSAHQSRSRMLELSAPELEPPKAALSPSQVEVPEDEEDYTGVCHPECGDKGCDGPNADQCLNCVHFSLGSVKTSRKCVSVCPLGYFGDTAARRCRRCHKGCETCSSRAATQCLSCRRGFYHHQEMNTCVTLCPAGFYADESQKNCLKCHPSCKKCVDEPEKCTVCKEGFSLARGSCIPDCEPGTYFDSELIRCGECHHTCGTCVGPGREECIHCAKNFHFHDWKCVPACGEGFYPEEMPGLPHKVCRRCDENCLSCAGSSRNCSRCKTGFTQLGTSCITNHTCSNADETFCEMVKSNRLCERKLFIQFCCRTCLLAG

SEQ ID NO: 3691 - protein, 970 aa, Homo sapiens
MLQQVNGHNPGSDGQAREYLREDLQEFLGGEVLLYKLDDLTRVNPVTLETVLRCLQARYMADTFYTNAGCTLVALNPFKPVPQLYSPELMREYHAAPQPQKLKPHVFTVGEQTYRNVKSLIEPVNQSIVVSGESGAGKTWTSRCLMKFYAVVATSPASWESHKIAERIEQRILNSNPVMEAFGNACTLRNNNSSRFGKFIQLQLNRAQQMTGAAVQTYLLEKTRVACQASSERNFHIFYQICKGASEDERLQWHLPEGAAFSWLPNPERSLEEDCFEVTREAMLHLGIDTPTQNNIFKVLAGLLHLGNIQFAASEDEAQPCQPMDDAKYSVRTAASLLGLPEDVLLEMVQIRTIRAGRQQQVFRKPCARAECDTRRDCLAKLIYARLFDWLVSVINSSICADTDSWTTFIGLLDVYGFESFPDNSLEQLCINYANEKLQQHFVAHYLRAQQEEYAVEGLEWSFINYQDNQPCLDLIEGSPISICSLINEECRLNRPSSAAQLQTRIETALAGSPCLGHNKLSREPSFIVVHYAGPVRYHTAGLVEKNKDPIPPELTRLLQQSQDPLLMGLFPTNPKEKTQEEPPGQSRAPVLTVVSKFKASLEQLLQVLHSTTPHYIRCIKPNSQGQAQTFLQEEVLSQLEACGLVETIHISAAGFPIRVSHRNFVERYKLLRRLHPCTSSGPDSPYPAKGLPEWCPHSEEATLEPLIQDILHTLPVLTQAAAITGDSAEAMPAPMHCGRTKVFMTDSMLELLECGRARVLEQCARCIQGGWRRHRHREQERQWRAVMLIQAAIRSWLTRKHIQRLHAAATVIKRAWQKWRIRMACLAAKELDGVEEKHFSQAPCSLSTSPLQTRLLEAIIRLWPLGLVLANTAMGVGSFQRKLVVWACLQLPRGSPSSYTVQTAQDQAGVTSIRALPQGSIKFHCRKSPLRYADICPEPSPYSITGFNQILLERHRLIHVTSSAFTGLG

SEQ ID NO: 3692 - protein, 673 aa, Homo sapiens
MSRTLASAVPLSSPDYYERLGQLQHGLRDSEKKRLDLEKKLYEYNQSDTCRVKLKYVKLKNYLKEICESEKKAHTRNQEYLKRFERVQAHVVHFTTNTEKLQKLKLEYETQIKKMLCSKDSLGLKEELTDEDREKVAVHEGINSGTAMSRGLYQPATIFMGRQMSAILSMRDFSTEHKSPQPTKNFSIPDPHSHRQTAQSSNVTDSCVVQTSNDTQCLNKSDNIDGKASLQIGEKMPVTASVLSEEEQTHCLEIGSNTRHGKSNLSEGKKSAELNSPLRERLSPENRTTDLKCDSSSGSEGEILTREHIEVEEKRASPPVSPIPVSEYCESENKWSQEKHSPWEGVSDHLAHREPKSQKPFRKMQEEEEESWSTSSDLTISISEDDLILESPEPQPNPGGKMEGEDGIEALKLIHAEQERVALSTEKNCILQTLSSPDSEKESSTNAPTREPGQTPDSDVPRAQVGQHVATLKEHDNSVKEEATALLRKALTEECGRRSAIHSSESSCSLPSILNDNSGIKEAKPAVWLNSVPTREQEVSSGCGDKSKKENVAADIPITETEAYQLLKKATLQDNTNQTENRFQKTDASVSHLSGLNIGSGAFETKTANKIASEASFSSSEGSPLSRHENKKKPVINLKSNALWDESDDSNSEIEAALRPRNHNTDDSDDFYD

SEQ ID NO: 3693 - protein, 408 aa, Homo sapiens
MDVTSQARGVGLEMYPGTAQPAAPNTTSPELNLSHPLLGTALANGTGELSEHQQYVIGLFLSCLYTIFLFPIGFVGNILILVVNISFREKMTIPDLYFINLAVADLILVADSLIEVFNLHERYYDIAVLCTFMSLFLQVNMYSSVFFLTWMSFDRYIALARAMRCSLFRTKHHARLSCGLIWMASVSATLVPFTAVHLQHTDEACFCFADVREVQWLEVTLGFIVPFAIIGLCYSLIVRVLVRAHRHRGLRPRRQKALRMILAVVLVFFVCWLPENVFISVHLLQRTQPGAAPCKQSFRHAHPLTHGHVMSLNCGQMWLLAPRGLARVTLAWSPWGCLGNLTTGHLALLTQNCYNPKALAPQGPKASGDQPVTQLLPANPACRCTCLPLQETFLTPSTRKATRRGHCG

SEQ ID NO: 3694 - protein, 214 aa, Homo sapiens
MAEQVLPQALYLSNMRKAVKIRERTPEDIFKPTNGIIHHFKTMHRYTLEMFRTCQFCPQFREIIHKALIDRNIQATLESQKKLNWCREVRKLVALKTNGDGNCLMHATSQYMWGVQDTDLVLRKALFSTLKETDTRNFKFRWQLESLKSQEFVETGLCYDTRNWNDEWDNLIKWLPQTHPWPEVDFSTTHWKKYTYLSFATSSEGQSLSFQTKC

SEQ ID NO: 3695 - protein, 484 aa, Homo sapiens
MKRYGKILMHHIPEQTTQLLKGLCTDYRPSLEGRSDREAPGCRANSEEFIPIFANNPRELKAFLEHMSEVQPDSPQGIYDTLLELRLQNWAHEKDPQVKEKLHAEAISLLKSGRFCDVFDKALVLCQMHDFQDGVLYLYEQGKLFQQIMHYHMQHEQYRQVISVCERHGEQDPSLWEQALSYFARKEEDCKEYVAAVLKHIENKNLMPPLLVVQTLAHNSTATLSVIRDYLVQKLQKQSQQIAQDELRVRRYREETTRIRQEIQELKASPKIFQKTKCSICNSALELPSVHFLCGHSFHQHCFESYSESDADCPTCLPENRKVMDMIRAQEQKRDLHDQFQHQLKCSNDSFSVIADYFGRGVFNKLTLLTDPPTARLTSAWRLGCNATYSCTPGGALKQPGGRCGQQWRTKRTDTMGPGRALHRRLADMPRAPLSSNVTALRTKADFLSLPSYLVSLPSLLFTSSVDHSRSVGEGTSATSECGQ

SEQ ID NO: 3696 - protein, 603 aa, Homo sapiens
MLLAVLLLLPLPSSWFAHGHPLYTRLPPSALQVLSAQGTQALQAAQRSAQWAINRVAMEIQHRSHECRGSGRPRPQALLQDPPEPGPCGERRPSTANVTRAHGRIVGGSAAPPGAWPWLVRLQLGGQPLCGGVLVAASWVLTAAHCFVGAPNELLWTVTLAEGSRGEQAEEVPVNRILPHPKFDPRTFHNDLALVQLWTPVSPGGSARPVCLPQEPQEPPAGTACAIAGWGALFEDGPEAEAVREARVPLLSTDTCRRALGPGLRPSTMLCAGYLAGGVDSCQGDSGGPLTCSEPGPRPREVLFGVTSWGDGCGEPGKPGVYTRVAVFKDWLQEQMSASSSREPSCRELLAWDPPQELQADAARLCAFYARLCPGSQGACARLAHQQCLQRRRRCELRSLAHTLLGLLRNAQELLGPRPGLRRLAPALALPAPALRESPLHPARELRLHSGSRAAGTRFPKRRPEPRGEANGCPGLEPLRQKLAALQGAHAWILQVPSEHLAMNFHEVLADLGSKTLTGLFRAWVRAGLGGRHVAFSGLVGLEPATLARSLPRLLVQALQAFRVAALAEGEPEGPWMDVGQGPGLERKGHHPLNPQVPPARQP

SEQ ID NO: 3697 - protein, 1283 aa, Homo sapiens
MSAVVAQTLHVFGLRSHVANNIFYFDEQIIIFPSGNHCVKYNVDQKWQKFIPGSEKSQGMLALSISPNRRYLAISETVQEKPAITIYELSSIPCRKRKVLNNFDFQVQKFISMAFSPDSKYLLAQTSPPESNLVYWLWEKQKVMAIVRIDTQNNPVYQVSFSPQDNTQVCVTGNGMFKLLRFAEGTLKQTSFQRGEPQNYLAHTWVADDKIVVGTDTGKLFLFESGDQRWETSIMVKEPTNGSKSLDVIQESESLIEFPPVSSPLPSYEQMVAASSHSQMSMPQVFAIAAYSKGFACSAGPGRVLLFEKMEEKDFYRESREIRIPVDPQSNDPSQSDKQDVLCLCFSPSEETLVASTSKNQLYSITMSLTEISKGEPAHFEYLMYPLHSAPITGLATCIRKPLIATCSLDRSIRLWNYETNTLELFKEYQEEAYSISLHPSGHFIVVGFADKLRLMNLLIDDIRSFKEYSVRGCGECSFSNGGHLFAAVNGNVIHVYTTTSLENISSLKGHTGKIRSIVWNADDSKLISGGTDGAVYEWNLSTGKRETECVLKSCSYNCVTVSPDAKIIFAVGSDHTLKEIADSLILREISAFDVTYTAIVISHSGRMMFVGTSVGTIRAMKYPLPLQKEFNEYQAHAGPITKMLLTFDDQFLLTAAEDGCLFTWKVFDKDGRGIKREREVGFAEEVLVTKTDMEEKAQVMLELKTRVEELKMENEYQLRLKDMNYSEKIKELTDKFIQEMESLKTKNQVLRTEKEKQDVYHHEHIEDLLDKQSRELQDMECCNNQKLLLEYEKYQELQLKSQRMQEEYEKQLRDNDETKSQALEELTEFYEAKLQEKTTLLEEAQEDVRQQLREFEETKKQIEEDEDREIQDIKTKYEKKLRDEKESNLRLKGETGIMRKKFSSLQKEIEERTNDIETLKGEQMKLQGVIKSLEKDIQGLKREIQERDETIQDKEKRIYDLKKKNQELGKFKFVLDYKIKELKKQIEPRENEIRVMKEQIQENDPILKWPQRVEIHLYNFRKQVRKVLLWGTLPQMEAELENFHKQNTQLELNITELWQKLRATDQEMRRERQKERDLEALVKRFKTDLHNCVAYIQEPRLLKEKVRGLFEKYVQRADMVEIAGLNTDLQQEYTRQREHLERNLATLKKKVVKEGELHRTDYVRIMQENVSLIKEINELRRELKFTRSQVYDLEAALKLTKKVRPQEVSETEPSRDMLSTAPTARLNEQEETGRIIEMQRLEIQRLRDQIQEQEQVTGFHTLAGVRLPSLSNSEVDLEVKTN

SEQ ID NO: 3698 - protein, 819 aa, Homo sapiens
METLTSRHEKRALHSQASAISQDREEKIMSQEPLSFKDVAVVFTEEELELLDSTQRQLYQDVMQENFRNLLSVGDKNGKDTEYIQDEELRFFSHKELSSCKIWEEVAGELPGSQDCRVNLQGKDFQFSEDAAPHQGWEGASTPCFPIENFLDSLQGDGLIGLENQQFPAWRAIRPIPIQGSWAKAFVNQLGDVQERCKNLDTEDTVYKCNWDDDSFCWISCHVDHRFPEIDKPCGCNKCRKDCIKNSVLHRINPGENGLKSNEYRNGFRDDADLPPHPRVPLKEKLCQYDEFSEGLRHSAHLNRHQRVPTGEKSVKSLERGRGVRQNTHIRNHPRAPVGDMPYRCDVCGKGFRYKSVLLIHQGVHTGRRPYKCEECGKAFGRSSNLLVHQRVHTGEKPYKCSECGKGFSYSSVLQVHQRLHTGEKPYTCSECGKGFCAKSALHKHQHIHPGEKPYSCGECGKGFSCSSHLSSHQKTHTGERPYQCDKCGKGFSHNSYLQAHQRVHMGQHLYKCNVCGKSFSYSSGLLMHQRLHTGEKPYKCECGKSFGRSSDLHIHQRVHTGEKPYKCSECGKGFRRNSDLHSHQRVHTGERPYVCDVCGKGFIYSSDLLIHQRVHTGEKPYKCAECGKGFSYSSGLLIHQRVHTGEKPYRCQECGKGFRCTSSLHKHQRVHTGKKPYTCDQCGKGFSYGSNLRTHQRLHTGEKPYTCCECGKGFRYGSGLLSHKRVHTGEKPYRCHVCGKGYSQSSHLQGHQRVHTGEKPYKCEECGKGFGRNSCLHVHQRVHTGEKPYTCGVCGKGFSYTSGLRNHQRVHLGENPYK

SEQ ID NO: 3699 - protein, 2354 aa, Homo sapiens
AYFRQGVALQYLGRHADALAAFASGLAQDPKSLQLLVGMVEAAMKSPMRDSLEPTYQQLQKMKLDKSPFVVVSVVGQELLTAGHHGASVVVLEAALKIGTCSLKLRGSVFSALSSAYWSLGNTEKSTGYMQQDLDVAKTLGDQTGECRAHGNLGSAFFSKGNYREALTNHRHQLVLAMKLKDREAASSALSSLGHVYTAIGDYPNALASHKQCVLLAKQSKDELSEARELGNMGAVYIAMGDFENAVQCHEQHLKIAKDLGNKREEARAYSNLGSAYHYRRNFDKAMSYHNYVLELAQELMEKAIEMRAYAGLGHAARCMQDLERAKQYHEQQLGIAEDLKDRAAEGRASSNLGIIHQMKGDYDTALKLHKTHLCIAQELSDYAAQGRAYGNMGNAYNALGMYDQAVKYHRQELQISMEVNDRASQASTHGNLAVAYQALGAHDRALQHYQNHLNIARELRDIQSEARALSNLGNFHCSRGEYVQAAPYYEQYLRLAPDLQDMEGEGKVCHNLGYAHYCLGNYQEAVKYYEQDLALAKDLHDKLSQAKAYCNLGLAFKALLNFSKAEECQKYLLSLAQSLNNSQAKFRALGNLGDIFICKKDINGAIKFYEQQLGLAHQVKDRRLEASAYAALGTAYRMIQKYDKALGYHTQELEVYQELSDLPGECRAHGHLAAVYMALGKYTMAFKCYEEQLDLGQKLKDPSLEAQVYGNMGITKMNMNVMEEAIGYFEQQLAMLQQLSGNESVLDRGRAYGNLGDCYEALGDYEEAIKYYEQYLSVAQSLNRMQDQAKAYRGLGNGHRAMGSLQQALVCFEKRLVVAHELGEAFNKAQAYGELGSLHSQLGNYEQAISCLERQLNIARDMKDRALESDAACGLGGVYQQMGEYDTALQYHQLDLQIAEETNNPTCQGRAYGNLGLTYESLGTFERAVVYQEQHLSIAAQMNDLAAKTVSYSSLGRTHHALQNYSQAVMYLQEGLRLAEQLGRREDEAKIRHGLGLSLWASGNLEEAQHQLYRASALFETIRHEAQLSTDYKLSLFDLQTSSYQALQRVLVSLGHHDEALAVAERGRTRAFADLLVERQTGQQDSDPYSPVTIDQILEMVNGQRGLVLYYSLAAGYLYSWLLAPGAGIVKFHEHYLGENTVENSSDFQASSSVTLPTATGSALEQHIASVREALGVESHYSRACASSETESEAGDIMDQQFEEMNNKLNSVTDPTGFLRMVRRNNLFNRSCQSMTSLFSNTVSPTQDGTSSLPRRQSSFAKPPLRALYDLLIAPMEGGLMHSSGPVGRHRQLILVLEGELYLIPFALLKGSSSNEYLYERFGLLAVPSIRSLSVQSKSHLRKNPPTYSSSTSMAAVIGNPKLPSAVMDRWLWGPMPSAEEEAYMVSELLGCQPLVGSVATKERVMSALTQAECVHFATHISWKLSALVLTPSMDGNPASSKSSFGHPYTIPESLRVQDDASDGESISDCPPLQELLLTAADVLDLQLPVKLVVLGSSQESNSKVTADGVIALTRAFLAAGAQCVLVSLWPVPVAASKMFIHAFYSSLLNGLKASAALGEAMKVVQSSKAFSHPSNWAGFMLIGSDVKLNSPSSLIGQALTEILQHPERARDALRVLLHLVEKSLQRIQNGQRNAMYTSQQSVENKVGGIPGWQALLTAVGFRLDPPTSGLPAAVFFPTSDPGDRLQQCSSTLQSLLGLPNPALQALCKLITASETGEQLISRAVKNMVGMLHQVLVQLQAGEKEQDLASAPIQVSISVQLWRLPGCHEFLAALGFDLCEVGQEEVILKTGKQANRRTVHFALQSLLSLFDSTELPKRLSLDSSSSLESLASAQSVSNALPLGYQQPPFSPTGADSIASDAISVYSLSSIASSMSFVSKPEGGSEGGGPGGRQDHDRSKNAYLQRSTLPRSQLPPQTRPAGNKDEEEYEGFSIISNEPLATYQENRNTCFSPDHKQPQPGTAGGMRVSVSSKGSISTPNSPVKMTLIPSPNSPFQKVGKLASSDTGESDQSSTETDSTVKSQEESNPKLDPQELAQKILEETQSHLIAVERLQRSGGQVSKSNNPEDGVQAPSSTAVFRASETSAFSRPVLSHQKSQPSPVTVKPKPPARSSSLPKVSSGYSSPTTSEMSIKDSPSQHSGRPSPGCDSQTSQLDQPLFKLKYPSSPYSAHISKSPRNMSPSSGHQSPAGSAPSPALSYSSAGSARSSPADAPDIDKLKMAAIDEKVQAVHNLKMFWQSTPQHSTGPMKIFRGAPGTMTSKRDVLSLLNLSPRHNKKEEGVDKLELKELSLQQHDGAPPKAPPNGHWRTETTSLGSLPLPAGPPATAPARPLRLPSGNGYKFLSPGRFFPSSKC

SEQ ID NO: 3700 - protein, 144 aa, Homo sapiens
MALLLTTVIALTCLGGFASPGPVPPSTALRELIEELVNITQNQKAPLCNGSMVWSINLTAGMYCAALESLINVSGCSAIEKTQRMLSGFCPHKVSAGQFSSLHVRDTKIEVAQFVKDLLLHLKKLFREGQFNNFESIIICRDRT

SEQ ID NO: 3701 - protein, 331 aa, Homo sapiens
MAPRRARGCRTLGLPALLLLLLLRPPATRDARDRLAVLAGRSRISESFNHEVQTHEACVRLRTMENCPQCHHHRTSRQQAGITCPPPMSVEHADIWVKSYSLYSRERYICNSGFKRKAGTSSLTECVLNKATNVAHWTTPSLKCIRDPALVHQRPAPPSTVTTAGVTPQPESLSPSGKEPAASSPSSNNTAATTAAIVPGSQLMPSKSPSTGTTEISSHESSHGTPSQTTAKNWELTASASHQPPGVYPQGHSDTTVAISTSTVLLCGLSAVSLLACYLKSRWLAKRSLPGDAEAPNMSRGGRNAWEQLSRAPATSLLRTPVESALSASRP

SEQ ID NO: 3702 - protein, 673 aa, Homo sapiens; identical to SEQ ID NO: 3459

SEQ ID NO: 3703 - protein, 172 aa, Homo sapiens
MGDQPNLPYVLAFLYEAMRFSSFVPVTIPHATTANTSVLGYHIPKDTVVFVNQWSVNHDPLKWPNPENFDPARFLDKDGLINKDLTSRVMIFSVGKRRCIGEELSKMQLFLFISILAHQCDFRANPNEPAKMNFSYGLTIKPKSFKVNVTLRESMELLDSAVQNLQAKETCQ

SEQ ID NO: 3704 - protein, 825 aa, Homo sapiens
METLTSRHEKRALHSQASAISQDREEKIMSQEPLSFKDVAVVFTEEELELLDSTQRQLYQDVMQENFRNLLSVGERNPLGDKNGKDTEYIQDEELRFFSHKELSSCKIWEEVAGELPGSQDCRVNLQGKDFQFSEDAAPHQGWEGASTPCFPIENFLDSLQGDGLIGLENQQFPAWRAIRPIPIQGSWAKAFVNQLGDVQERCKNLDTEDTVYKCNWDDDSFCWISCHVDHRFPEIDKPCGCNKCRKDCIKNSVLHRINPGENGLKSNEYRNGFRDDADLPPHPRVPLKEKLCQYDEFSEGLRHSAHLNRHQRVPTGEKSVKSLERGRGVRQNTHIRNHPRAPVGDMPYRCDVCGKGFRYKSVLLIHQGVHTGRRPYKCEECGKAFGRSSNLLVHQRVHTGEKPYKCSECGKGFSYSSVLQVHQRLHTGEKPYTCSECGKGFCAKSALHKHQHIHPGEKPYSCGECGKGFSCSSHLSSHQKTHTGERPYQCDKCGKGFSHNSYLQAHQRVHMGQHLYKCNVCGKSFSYSSGLLMHQRLHTGEKPYKCECGKSFGRSSDLHIHQRVHTGEKPYKCSECGKGFRRNSDLHSHQRVHTGERPYVCDVCGKGFIYSSDLLIHQRVHTGEKPYKCAECGKGFSYSSGLLIHQRVHTGEKPYRCQECGKGFRCTSSLHKHQRVHTGKKPYTCDQCGKGFSYGSNLRTHQRLHTGEKPYTCCECGKGFRYGSGLLSHKRVHTGEKPYRCHVCGKGYSQSSHLQGHQRVHTGEKPYKCEECGKGFGRNSCLHVHQRVHTGEKPYTCGVCGKGFSYTSGLRNHQRVHLGENPYK

SEQ ID NO: 3705 - protein, 576 aa, Homo sapiens; identical to SEQ ID NO: 444

SEQ ID NO: 3706 - protein, 670 aa, Homo sapiens [sequence omitted]

SEQ ID NO: 3707 - protein, 80 aa, Homo sapiens
MASSSTVPLGFHYETKYVVLSYLGLLSQEKLQEQHLSSPQGVQLDIASQSLDQEILLKVKTEIEEELKSLDKEISEGHCV

SEQ ID NO: 3708 - protein, 444 aa, Homo sapiens
MAETKIIYHMDEEETPYLVKLPVAPERVTLADFKNVLSNRPVHAYKFFFKSMDQDFGVVKEEIFDDNAKLPCFNGRVVSWLVLAEGAHSDAGSQGTDSHTDLPPPLERTGGIGDSRPPSFHPNVASSRDGMDNETGTESMVSHRRERARRRNREEAARTNGHPRGDRRRDVGLPPDSASTALSSELESSSFVDSDEDGSTSRLSSSTEQSTSSRLIRKYASSLLKHGFLRHTVNKITFSEQCYYVFGDLCSNLATLNLNSGSSGTSDQDTLAPLPHPAAPWPLGQGYPYQYPGPPPCFPPAYQDPGFSYGSGSTGSQQSEGSKSSGSTRSSRRAPGREKERRAAGAGGSGSESDHTAPSGVGSSWRERPAGQLSRGSSPRSQASATAPGLPPPHPTTKAYTVVGGPPGGPPVRELAAVPPELTGSRQSFQKAMGNPCEFFVDIM

SEQ ID NO: 3709 - protein, 1732 aa, Homo sapiens
MFFKGGSWLWLYIRTSIILGSELNSPAPHGQNNCYQLNRFQCSFEEAQHYCHVQRGFLAHIWNKEVQDLIRDYLEEGKKWWIGQNVMPLKKHQDNKYPADVAANGPPKPLSCTYLSRNFIRISSKGDKCLLKYYFICQTGDFLDGDAHYERNGNNSHLYQRHKKTKRGVAIARDKMPPGPGHLPTTCHYPLPAHLSKTLCHPISQFPSVLSSITSQVTSAASEPSSQPLPVITQLTMPVSVTHAGQSLAETTSSPKEEGHPNTFTSYLQVSLQKASGQVIDEIAGNFSRAVHGLQALNKLQEACEFLQKLTALTPRFSKPAQVNLINSLIYLSEELLRIPFQNNNSLGFKVPPTVCPFHSLNNVTKAGEGSWLESKRHTEPVEDILEMSLVEFGNIGEAFLEQNQSPESSVTLTSANATLLLSRQNISTLPLSSYTLGHPAPVRLGFPSALALKELLNKHPGVNVQITGLAFNPFKDLDNRNIVGSIGSVLLSANRKLLQVHDLMEDIEIMLWRNVSLETHPTSLNMSTHQLTITVNVTSLEKSLIVSIDPDSPLLMTLYLGFQYQPNCTHFHLNITLPKDKVWQKDEEYTWVLNPEHLQHGIGTYYITAVLSERQEGAQQTPSLVSVITAVTQCYYWEIHNQTWSSAGCQVGPQSTILRTQCLCNHLTFFASDFFVVPRTVNVEDTIKLFLRVTNNPVGVSLLASLLGFYVITVVWARKKDQADMQKVKVTVLADNDPSAQFHYLIQVYTGYRRSAATTAKVVITLYGSEGRSEPHHLCDPQKTVFERGGLDVFLLTTWTSLGNLHSLRLWHDNSGVSPSWYVSQVIVCDMAVKRKWHFLCNCWLAVDLGDCELDRVFIPVSKRELFSFRHLFSSMIVEKFTQDYLWLSIATRHPWNQFTRVQRLSCCMTLLLCNMVINVMFWKINSTTAKRDEQMRPFAVAWSELLVSIHTAVILFPINLVIGRLFPLIEPQETLPLFPPIQASCLSDASVEPLSATMVVEELKETVRFLLRRNTYLLSKCEQPPWSSWDITKLVKLLSSLVSSHLEGQGCHQQGERHWARVVPENHHHFCCYLHRVLQRLKSHLGTLGLTQGHQSCDFLDAASQLQKLQELLETHILPTEQEPSREVTSFAILSSEEGKKPISNGLSKWLTSVCWLLLGFTSLASAFFTALYSLELSKDQATSWMISIILSVLQNIFISQPVKVVFFTFLYSLMMSRMPRLNKENEQQTKRILALLAKCSSSVPGSRDKNNPVYVAPAINSPTKHPERTLKKKKLFKLTGDILVQILFLTLLMTAIYSAKNSNRFYLHQAIWKTFSHQFSEIKLLQDFYPWANHILLPSLYGDYRGKNAVLEPSHCKCGVQLIFQIPRTKTYEKVDEGQLAFCDNGHTCGRPKSLFPGLHLRRFSYICSPRPMVLIPTDELHERLTSKNENGFSYIMRGAFFTSLRLESFTSLQMSKKGCVWSIISQVIYYLLVCYYAFIQGCQLKQQKWRFFTGKRNILDTSIILISFILLGLDMKSISLHKKNMARYRDDQDRFISFYEAVKVNSAATHLVGFPVLLATVQLWNLLRHSPRLRVISRTLSRAWDEVVGFLLIILILLTGYAIAFNLLFGCSISDYRTFFSSAVTVVGLLMGISHQEEVFALDPVLGTFLILTSVILMVLVVINLFVSAILMAFGKERKSLKKEAALIDTLLQKLSNLLGISWPQKTSSEQAATTAVGSDTEVLDELP

SEQ ID NO: 3710 - protein, 164 aa, Homo sapiens
DNAPEFNSSEYSVAITELAQVGFALPLFIQVVDKDEGLNSMFEVYLVGNNSHHFIISPTSVQGKADIRIRVAIPLDYETVDRYDFDLFANESVPDHVGYAKVKITLINENDNRPIFSQPLYNISLYENVTVGTSVLTVLWEKFFCSNSSRFSSAQLVVSSWNQL

SEQ ID NO: 3711 - protein, 60 aa, Homo sapiens
SQEEDFRLQNSTLMAEFSKPCRNAMGKKPGSSQLSVRARGIPQGAWPPPSWPPCRWQRWS

SEQ ID NO: 3712 - protein, 361 aa, Homo sapiens
MSEARKGPDEAEESQYDSGIESLRSLRSLPESTSAPASGPSDGSPQPCTHPPGPVKEPQEKEDADGERADSTYGSSSLTYTLSLLGGPEAEDPAPRLPLPHVGALSPQQLEALTYISEDGDTLVHLAVIHEAPAVLLCCLALLPQEVLDIQNNLYQTALHLAVHLDQPGAVRALVLKGASRALQDRHGDTALHVACQRQHLACARCLLEGRPEPGRGTSHSLDLQLQNWQGLACLHIATLQKNQPLMELLLRNGADIDVQEGTSGKTALHLAVETQERGLVQFLLQAGAQVDARMLNGCTPLHLAAGRGLMGISSTLCKAGADSLLRNVEDETPQDLTEESLVLLPFDDLKISGKLLLCTD

SEQ ID NO: 3713 - protein, 238 aa, Homo sapiens
MRPAALRGALLGCLCLALLCLGGADKRLRDNHEWKKLIMVQHWPETVCEKIQNDCRDPPDYWTIHGLWPDKSEGCNRSWPFNLEEIKKNWMEITDSSLPSPSMGPAPPRWMRSTPRRSTLAEAWNSTGSWTSTGGCALPPAALPSGDLCCRPSLTAGSRGVGVDLTALQQLLHVHYSATGIIPEECSEPTKPFQIILHHDHTEWVQSIGMPIWTISSSESAIGKTRTQPACAVLSHDS

SEQ ID NO: 3714 - protein, 317 aa, Homo sapiens; identical to SEQ ID NO: 2325

SEQ ID NO: 3715 - protein, 348 aa, Homo sapiens
MPHIDNDVKLDFKDVLLRPKRSTLKSRSEVDLTRSFSFRNSKQTYSGVPIIAANMDTVGTFEMAKVLCKFSLFTAVHKHYSLVQWQEFAGQNPDCLESIWLPAQAQALLTLSSWNRSWKLFPRKYICLDVANGYSEHFVEFVKDVRKRFPQHTIMAGNVVTGEMVEELILSGADIIKVGIGPGSVCTTRKKTGVGYPQLSAVMECADAAHGLKGHIISDGGCSCPGDVAKAFGAGADFVMLGGMLAGHSESGGELIERDGKKYKLFYGMSSEMAMKKYAGGVAEYRASEGKTVEVPFKGDVEHTIRDILGGIRSTCTYVGAAKLKELSRRTTFIRVTQQVNPIFSEAC

SEQ ID NO: 3716 - protein, 563 aa, Homo sapiens; identical to SEQ ID NO: 2500

SEQ ID NO: 3717 - protein, 151 aa, Homo sapiens
MSRRKQSNPRQIKRSLGDMEAREEVQLVGASHMEQKATAPEAPSPPSADVNSPPPLPPPTSPGGPKELEGQEPEPRPTEEEPGSPWSGPDELEPVVQDGQRRIRARLSLATGLSWGPFHGSVQTRASSPRQAEPRGAISALAPSVQTHRTR

SEQ ID NO: 3718 - protein, 575 aa, Homo sapiens
MEKIIQVAKTSAAQHIQSIMAAAGVPVVEGYHGEDQSDQCLKEHARRIGYPVMIKAVRGGGGKGMRIVRSEQEFQEQLESARREAKKSFNDDAMLIEKFVDTPRHVEVQVFGDHHGNAVYLFERDCSVQRRHQKIIEEAPAPGIKSEVRKKLGEAAVRAAKAVNYVGAGTVEFIMDSKHNFCFMEMNTRLQVEHPVTEMITGTDLVEWQLRIAAGEKIPLSQEEITLQGHAFEARIYAEDPSNNFMPVAGPLVHLSTPRADPSTRIETGVRQGDEVSVHYDPMIAKLVVWAADRQAALTKLRYSLRQYNIVGLHTNIDFLLNLSGHPEFEAGNVHTDFIPQHHKQLLLSRKAAAKESLCQAALGLILKEKAMTDTFTLQAHDQFSPFSSSSGRRLNISYTRNMTLKDGKNNVAIAVTYNHDGSYSMQIEDKTFQVLGNLYSEGDCTYLKCSVNGVASKAKLIILENTIYLFSKEGSIEIDIPVPKYLSSVSSQETQGGPLAPMTGTIEKVFVKAGDKVKAGDSLMVMIAMKMEHTIKSPKDGTVKKVFYREGAQANRHTPLVEFEEEESDKRESE

SEQ ID NO: 3719 - protein, 393 aa, Homo sapiens
MHRLAQGRSQDQPSSPATEEPANLSRRLCWGLSVPASRMEEGERSPLLSQETAGQKPLSVHRPPTSGCLGPVPREDQAEAWGCSCCPPETKHQALSGTPKKGPAPSLSPGSSCVKYLIFLSNFPFSLLGLLALAIGLWGLAVKGSLGSDLGGPLPADPMLGLALGGLVVSAVSLAGYLGALCENTCLLRGFSGGILAFLVLEAVAGALVVALWGPLQDSLEHTLRVAIAHYQDDPDLRFLLDQVQLGLRCCGAASYQDWQQNLYFNCSSPGVQACSLPASCCIDPREDGASVNDQCGFGVLRLDADAAQRVVYLEGCGPPLRRWLRANLAASGGYAIAVVLLQGAELLLAARLLGALAARRGAAYGPGARGEDRAGPQSPSPGAPPAAKPARG

SEQ ID NO: 3720 - protein, 478 aa, Homo sapiens
MELLTFKDVAIEFSPEEWKCLDTSQQNLYRDVMLENYRNLVSLGVSISNPDLVTSLEQRKEPYNLKIHETAARPPAVCSHFTQNLWTVQGIEDSFHKLIPKGHEKRGHENLRKTCKSINECKVQKGGYNRINQCLLTTQKKTIQSNICVKVFHKFSNSNKDKIRYTGDKTFKCKECGKSFHVLSRLTQHKRIHTGENPYTCEECGKAFNWSSILTKHKRIHAREKFYKCEECGKGFTRSSHLTKHKRIHTGEKPYICEKCGKAFNQSSTLNLHKRIHSAQKYYKCEECGKAFKWSSSLNEHKRIHAGEKPFSCEECGNVFTTSSDFAKHKRIHTGEKPYKCEECGKSFNRSTTLTTHKRIHTGEKPYTCEECGKAFNWSSTLNVHKRIHSGKNPYKCEDCGKAFKVFANLHNHKKIHTGEKPYICKQCGKAFKQSSHLNKHKKIHTVDKPYKCKECGKAFKQYSNLPQHKRTHTGGKF

SEQ ID NO: 3721 - protein, 1365 aa, Homo sapiens
MEEVVGHTQGPLDGSLYAKVKKKDSLHGSTGAVNATRPTLSATPNHVEHTLSVSSDSGNSTASTKTDKTDEPVPGASSATAALSPQEKRELDRLLSGFGLEREKQGAMYHTQHLRSRPAGGSAVPSSGRHVVPAQVHVNGGALASERETDILDDELPNQDGHSAGSMGTLSSLDGVTNTSEGGYPEALSPLTNGLDKSYPMEPMVNGGGYPYESASRAGPAHAGHTAPMRPSYSAQEGLAGYQREGPHPAWPQPVTTSHYAHDPSGMFRSQSFSEAEPQLPPAPVRGGSSREAVQRGLNSWQQQQQQQQQPRPPPRQQERAHLESLVASRPSPQPLAETPIPSLPEFPRAASQQEIEQSIETLNMLMLDLEPASAAAPLHKSQSVPGAWPGASPLSSQPLSGSSRQSHPLTQSRSGYIPSGHSLGTPEPAPRASLESVPPGRSYSPYDYQPCLAGPNQDFHSKSPASSSLPAFLPTTHSPPGPQQPPASLPGLTAQPLLSPKEATSDPSRTPEEEPLNLEGLVAHRVAGVQAREKQPAEPPAPLRRRAASDGQYENQSPEATSPRSPGVRSPVQCVSPELALTIALNPGGRPKEPHLHSYKEAFEEMEGTSPSSPPPSGVRSPPGLAKTPLSALGLKPHNPADILLHPTGEPRSYVESVARTAVAGPRAQDSEPKSFSAPATQAYGHEIPLRNGTLGGSFVSPSPLSTSSPILSADSTSVGSFPSGESSDQGPRTPTQPLLESGFRSGSLGQPSPSAQRNYQSSSPLPTVGSSYSSPDYSLQHFSSSPESQARAQFSVAGVHTVPGSPQARHRTVGTNTPPSPGFGWRAINPSMAAPSSPSLSHHQMMGPPGTGFHGSTVSSPQSSAATTPGSPSLCRHPAGVYQVSGLHNKVATTPGSPSLGRHPGAHQGNLASGLHSNAIASPGSPSLGRHLGGSGSVVPGSPCLDRHVAYGGYSTPEDRRPTLSRQSSASGYQAPSTPSFPVSPAYYPGLSSPATSPSPDSAAFRQGSPTPALPEKRRMSVGDRAGSLPNYATINGKVSSPVASGMSSPSGGSTVSFSHTLPDFSKYSMPDNSPETRAKVKFVQDTSKYWYKPEISREQAIALLKDQEPGAFIIRDSHSFRGAYGLAMKVSSPPPTIMQQNKKGDMTHELVRHFLIETGPRGVKLKGCPNEPNFGSLSALVYQHSIIPLALPCKLVIPNRDPTDESKDSSGPANSTADLLKQGAACNVLFVNSVDMESLTGPQAISKATSETLAADPTPAATIVHFKVSAQGITLTDNQRKLFFRRHYPLNTVTFCDLDPQERKWMKTEGGAPAKLFGFVARKQGSTTDNACHLFAELDPNQPASAIVNFVSKVMLNAGQKR

SEQ ID NO: 3722 - protein, 2170 aa, Homo sapiens
MIRIAALNASSTIEDDHEGSFKSHKTQTKEAQEAEAFALYHKALDLQKHDRFEESAKAYHELLEASLLREAVSSGDEKEGLKHPGLILKYSTYKNLAQLAAQREDLETAMEFYLEAVMLDSTDVNLWYKIGHVALRLIRIPLARHAFEEGLRCNPDHWPCLDNLITVLYTLSDYTTCLYFICKALEKDCRYSKGLVLKEKIFEEQPCLRKDSLRMFLKCWKCLGESLLAMYNHLTTCEPPRPSLGKRIDLSDYQDPSQPLESSMVVTPVNVIQPSTVSTNPAVAVAEPVVSYTSVATTSFPLHSPGLLETGAPVGDISGGDKSKKGVKRKKISEESGETAKRRSARVRNTKCKKEEKVDFQELLMKFLPSRLRKLDPEEEDDSFNNYEVQSEAKLESFPSIGPQRLSFDSATFMESEKQDVHEFLLENLTNGGILELMMRYLKAMGHKFLVRWPPGLAEVVLSVYHSWRRHSTSLPNPLLRDCSNKHIKDMMLMSLSCMELQLDQWLLTKGRSSAVSPRNCPAGMVNGRFGPDFPGTHCLGDLLQLSFASSQRDLFEDGWLEFVVRVYWLKARFLALQGDMEQALENYDICTEMLQSSTAIQVEAGAERRDIVIRLPNLHNDSVVSLEEIDKNLKSLERCQSLEEIQRLYEAGDYKAVVHLLRPTLCTSGFDRAKHLEFMTSIPERPAQLLLLQDSLLRLKDYRQCFECSDVALNEAVQQMVNSGEAAAKEEWVATVTQLLMGIEQALSADSSGSILKVSSSTTGLVRLTNNLIQVIDCSMAVQEEAKEPHVSSVLPWIILHRIIWQEEDTFHSLCHQQQLQNPAEEGMSETPMLPSSLMLLNTAHEYLGRRSWCCNSDGALLRFYVRVLQKELAASTSEDTHPYKEELETALEQCFYCLYSFPSKKSKARYLEEHSAQQVDLIWEDALFMFEYFKPKTLPEFDSYKTSTVSADLANLLKRIATIVPRTERPALSLDKVSAYIEGTSTEVPCLPEGADPSPPVVNELYYLLADYHFKNKEQSKAIKFYMHDICICPNRFDSWAGMALARASRIQDKLNSNELKSDGPIWKHATPVLNCFRRALEIDSSNLSLWIEYGTMSYALHSFASRQLKQWRGELPPELVQQMEGRRDSMLETAKHCFTSAARCEGDGDEEEWLIHYMLGKVAEKQQQPPTVYLLHYRQAGHYLHEEAARYPKKIHYHNPPELAMEALEVYFRLHASILKLLGKPDSGVGAEVLVNFMKEAAEGPFARGEEKNTPKASEKEKACLVDEDSHSSAGTLPGPGASLPSSSGPGLTSPPYTATPIDHDYVKCKKPHQQATPDDRSQDSTAVALSDSSSTQDFFNEPTSLLEGSRKSYTEKRLPILSSQAGATGKDLQGATEERGKNEESLESTEGFRAAEQGVQKPAAETPASACIPGKPSASTPTLWDGKKRGDLPGEPVAFPQGLPAGAEEQRQFLTEQCIASFRLCLSRFPQHYKSLYRLAFLYTYSKTHRNLQWARDVLLGSSIPWQQLQHMPAQGLFCERNKTNFFNGIWRIPVDEIDRPGSFAWHMNRSIVLLLKVLAQLRDHSTLLKVSSMLQRTPDQGKKYLRDADRQVLAQRAFILTVKVLEDTLSELAEGSERPGPKVCGLPGARMTTDVSHKASPEDGQEGLPQPKKPPLADGSGPGPEPGGKVGLLNHRPVAMDAGDSADQSGERKDKESPRAGPTEPMDTSEATVCHSDLERTPPLLPGRPARDRGPESRPTELSLEELSISARQQPTPLTPAQPAPAPAPATTTGTRAGGHPEEPLSRLSRKRKLLEDTESGKTLLLDAYRVWQQGQKGVAYDLGRVERIMSETYMLIKQVDEEAALEQAVKFCQVHLGAAAQRQASGDTPTTPKHPKDSRENFFPVTVVPTAPDPVPADSVQRPSDAHTKPRPALAAATTIITCPPSASASTLDQSKDPGPPRPHRPEATPSMASLGPEGEELARVAEGTSFPPQEPRHSPQVKMAPTSSPAEPHCWPAEAALGTGAEPTCSQEGKLRPEPRRDGEAQEAASETQPLSSPPTAASSKAPSSGSAQPPEGHPGKPEPSRAKSRPLPNMPKLVIPSAATKFPPEITVTPPTPTLLSPKGSISEETKQKLKSAILSAQSAANVRKESLCQPALEVLETSSQESSLESETDEDDDYMDI

SEQ ID NO: 3723 - protein, 913 aa, Homo sapiens
MIRHAGAPARGDPTGPVPVVGKGEEEEEEDGMRLCLPANPKNCLPHRRGISILEKLIKTCPVWLQLSLGQAEVARILHRVVAGMFLVRRDSSSKQLVLCVHFPSLNESSAEVLEYTIKEEKSILYLEGSALVFEDIFRLIAFYCVSRDLLPFTLRLPQAILEASSFTDLETIANLGLGFWDSSLNPPQERGKPAEPPRDRAPGFPLVSSLRPTAHDANCACEIELSVGNDRLWFVNPIFIEDCSSALPTDQPPLGNCPARPLPPTSDATSPTSRWAPRRPPPPPPVLPLQPCSPAQPPVPAPPLPAKKNLPTAPPRRRVSERVSLEDQSPGMAAEGDQLSLPPQGTSDGPEDTPRESTEQGQDTEVKASDPHSMPELPRTAKQPPVPPPRKKRISRQLASTLPAPLENAELCTQAMALETPTPGPPREGQSPASQAGTQHPPAQATAHSQSSPEFKGSLASLSDSLGVSVMATDQDSYSTSSTEEELEQFSSPSVKKKPSMILGKARHRLSFASFSSMFHAFLSNNRKLYKKVVELAQDKGSYFGSLVQDYKVYSLEMMARQTSSTEMLQEIRTMMTQLKSYLLQSTELKALVDPALHSEEELEAIVESALYKCVLKPLKEAINSCLHQIHSKDGSLQQLKENQLVILATTTTDLGVTTSVPEVPMMEKILQKFTSMHKAYSPEKKISILLKTCKLIYDSMALGNPGKPYGADDFLPVLMYVLARSNLTEMLLNVEYMMELMDPALQLGEGSYYLTTTYGALEHIKSYDKITVTRQLSVEVQDSIHRWERRRTLNKARASRSSVQDFICVSYLEPEQQARTLASRADTQAQALCAQCAEKFAVERPQAHRLFVLVDGRCFQLADDALPHCIKGYLLRSEPKRDFHFVYRPLDGGGGGGGGSPPCLVVREPNFL

SEQ ID NO: 3724 - protein, 540 aa, Homo sapiens
MQVAVHEGINSGTAMSRGLYQPATIFMGRQMSAILSMRDFSTEHKSPQPTKNFSIPDPHSHRQTAQSSNVTDSCVVQTSNDTQCLNKSDNIDGKASLQIGEKMPVTASVLSEEEQTHCLEIGSNTRHGKSNLSEGKKSAELNSPLRERLSPENRTTDLKCDSSSGSEGEILTREHIEVEEKRASPPVSPIPVSEYCESENKWSQEKHSPWEGVSDHLAHREPKSQKPFRKMQEEEEESWSTSSDLTISISEDDLILESPEPQPNPGGKMEGEDGIEALKLIHAEQERVALSTEKNCILQTLSSPDSEKESSTNAPTREPGQTPDSDVPRAQVGQHVATLKEHDNSVKEEATALLRKALTEECGRRSAIHSSESSCSLPSILNDNSGIKEAKPAVWLNSVPTREQEVSSGCGDKSKKENVAADIPITETEAYQLLKKATLQDNTNQTENRFQKTDASVSHLSGLNIGSGAFETKTANKIASEASFSSSEGSPLSRHENKKKPVINLKSNALWDESDDSNSEIEAALRPRNHNTDDSDDFYD

SEQ ID NO: 3725 - protein, 449 aa, Homo sapiens
CVVQTSNDTQCLNKSDNIDGKASLQIGEKMPVTASVLSEEEQTHCLEIGSNTRHGKSNLSEGKKSAELNSPLRERLSPENRTTDLKCDSSSGSEGEILTREHIEVEEKRASPPVSPIPVSEYCESENKWSQEKHSPWEGVSDHLAHREPKSQKPFRKMQEEEEESWSTSSDLTISISEDDLILESPEPQPNPGGKMEGEDGIEALKLIHAEQERVALSTEKNCILQTLSSPDSEKESSTNAPTREPGQTPDSDVPRAQATALLRKALTEECGRRSAIHSSESSCSLPSILNDNSGIKEAKPAVWLNSVPTREQEVSSGCGDKSKKENVAADIPITETEAYQLLKKATLQDNTNQTENRFQKTDASVSHLSGLNIGSGAFETKTANKIASEASFSSSEGSPLSRHENKKKPVINLKSNALWDESDDSNSEIEAALRPRNHNTDDSDDFYD

SEQ ID NO: 3726 - protein, 143 aa, Homo sapiens
MRPSVWAAVAAGLWVLCTVIAEGPPALPALALPLAGAPDAGGCQGAEGPLRGRGAELGAAQLLLPPQEGSSAAIASLHPQAHGEPQRFANLSCLAEKPIQTGVGSSGCPEIRARVCGWEGHGQMQRGASSFAFSICLMSHLQL

SEQ ID NO: 3727 - protein, 1269 aa, Homo sapiens
MSGPTDETAGDLPVKDTGLNLFGMGGLQETSTTRTMKSRQAVSRVSREELEDRFLRLHDENILLKQHARKQEDKIKRMATKLIRLVNDKKRYERVGGGPKRLGRDVEMEEMIEQLQEKVHELEKQNETLKNRLISAKQQLQTQGYRQTPYNNVQSRINTGRRKANENAGLQECPRKGIKFQDADVAETPHPMFTKYGNSLLEEARGEIRNLENVIQSQRGQIEELEHLAEILKTQLRRKENEIELSLLQLREQQATDQRSNIRDNVEMIKLHKQLVEKSNALSAMEGKFIQLQEKQRTLRISHDALMANGDELNMQLKEQRLKCCSLEKQLHSMKFSERRIEELQDRINDLEKERELLKENYDKLYDSAFSAAHEEQWKLKEQQLKVQIAQLETALKSDLTDKTEILDRLKTERDQNEKLVQENRELQLQYLEQKQQLDELKKRIKLYNQENDINADELSEALLLIKAQKEQKNGDLSFLVKVDSEINKDLERSMRELQATHAETVQELEKTRNMLIMQHKINKDYQMEVEAVTRKMENLQQDYELKVEQYVHLLDIRAARIHKLEAQLKDIAYGTKQYKFKPEIMPDDSVDEFDETIHLERGENLFEIHINKVTFSSEVLQASGDKEPVTFCTYAFYDFELQTTPVVRGLHPEYNFTSQYLVHVNDLFLQYIQKNTITLEVHQAYSTEYETIAACQLKFHEILEKSGRIFCTASLIGTKGDIPNFGTVEYWFRLRVPMDQAIRLYRERAKALGYITSNFKGPEHMQSLSQQAPKTAQLSSTDSTDGNLNELHITIRCCNHLQSRASHLQPHPYVVYKFFDFADHDTAIIPSSNDPQFDDHMYFPVPMNMDLDRYLKSESLSFYVFDDSDTQENIYIGKVNVPLISLAHDRCISGIFELTDHQKHPAGTIHVILKWKFAYLPPSGSITTEDLGNFIRSEEPEVVQRLPPASSVSTLVLAPRPKPRQRLTPVDKKVSFVDIMPHQSDETSPPPEDRKEISPEVEHIPEIEINMLTVPHVPKVSQEGSVDEVKENTEKMQQGKDDVSLLSEGQLAEQSLASSEDETEITEDLEPEVEEDMSASDSDDCIIPGPISKNIKQPSEKIRIEIIALSLNDSQVTMDDTIQRLFVECRFYSLPAEETPVSLPKPKSGQWVYYNYSNVIYVDKENNKAKRDILKAILQKQEMPNRSLRFTVVSDPPEDEQDLECEDIGVAHVDLADMFQEGRDLIEQNIDVFDARADGEGIGKLRVTVEALHALQSVYKQYRDDLEA

SEQ ID NO: 3728 - protein, 346 aa, Homo sapiens
MESPSAPPHRWCIPWQRLLLTASLLTFWNPPTTAKLTIESTPFNVAEGKEVLLLVHNLPQHLFGYSWYKGERVDGNRQIIGYVIGTQQATPGPAYSGREIIYPNASLLIQNIIQNDTGFYTLHVIKSDLVNEEATGQFRVYPELPKPSISSNNSKPVEDKDAVAFTCEPETQDATYLWWVNNQSLPVSPRLQLSNGNRTLTLFNVTRNDARAYVCGIQNSVSANRSDPVTLDVLYGPDTPIISPPDSSYLSGANLNLSCHSASNPSPQYSWRINGIPQQHTQVLFIAKITPNNNGTYACFVSNLATGRNNSIVKSITVSASGTSPGLSAGATVGIMIGVLVGVALI

SEQ ID NO: 3729 - protein, 2431 aa, Homo sapiens
MKGTDSGSCCRRRCDFGCCCRASRRAHYTPYRSGDATRTPQSPRQTPSRERRRPEPAGSWAAAAEEEEAAAAATPWMRDYFAEDDGEMVPRTSHTAAFLSDTKDRGPPVQSQIWRSGEKVPFVQTYSLRAFEKPPQVQTQALRDFEKHLNDLKKENFSLKLRIYFLEERMQQKYEASREDIYKRNIELKVEVESLKRELQDKKQHLDKTWADVENLNSQNEAELRRQFEERQQETEHVYELLENKIQLLQEESRLAKNEAARMAALVEAEKECNLELSEKLKGVTKNWEDVPGDQVKPDQYTEALAQRDKRIEELNQSLAAQERLVEQLSREKQQLLHLLEEPTSMEVQPMTEELLKQQKLNSHETTITQQSVSDSHLAELQEKIQQTEATNKILQEKLNEMSYELKCAQESSQKQDGTIQNLKETLKSRERETEELYQVIEGQNDTMAKLREMLHQSQLGQLHSSEGTSPAQQQVALLDLQSALFCSQLEIQKLQRVVRQKERQLADAKQCVQFVEAAAHESEQQKEASWKHNQELRKALQQLQEELQNKSQQLRAWEAEKYNEIRTQEQNIQHLNHSLSHKEQLLQEFRELLQYRDNSDKTLEANEMLLEKLRQRIHDKAVALERAIDEKFSALEEKEKELRQLRLAVRERDHDLERLRDVLSSNEATMQSMESLLRAKGLEVEQLSTTCQNLQWLKEEMETKFSRWQKEQESIIQQLQTSLHDRNKEVEDLSATLLCKLGPGQSEIAEELCQRLQRKERMLQDLLSDRNKQVLEHEMEIQGLLQSVSTREQESQAAAEKLVQALMERNSELQALRQYLGGRDSLMSQAPISNQQAEVTPTGRLGKQTDQGSMQIPSRDDSTSLTAKEDVSIPRSTLGDLDTVAGLEKELSNAKEELELMAKKERESQMELSALQSMMAVQEEELQVQAADMESLTRNIQIKEDLIKDLQMQLVDPEDIPAMERLTQEVLLLREKVASVESQGQEISGNRRQQLLLMLEGLVDERSRLNEALQAERQLYSSLVKFHAHPESSERDRTLQVELEGAQVLRSRLEEVLGRSLERLNRLETLAAIGGAAAGDDTEDTSTEFTDSIEEEAAHHSHQQLVKVALEKSLATVETQNPSFSPPSPMGGDSNRCLQEEMLHLRAEFHQHLEEKRKAEEELKELKAQIEEAGFSSVSHIRNTMLSLCLENAELKEQMGEAMSDGWEIEEDKEKGEVMVETVVTKEGLSESSLQAEFRKLQGKLKNAHNIINLLKEQLVLSSKEGNSKLTPELLVHLTSTIERINTELVGSPGKHQHQEEGNVTVRPFPRPQSLDLGATFTVDAHQLDNQSQPRDPGPQSAFSLPGSTQHLRSQLSQCKQRYQDLQEKLLLSEATVFAQANELEKYRVMLSESLVKQDSKQIQVDLQDLGYETCGRSENEAEREETTSPECEEHNSLKEMVLMEGLCSEQGRRGSTLASSSERKPLENQLGKQEEFRVYGKSENILVLRKDIKDLKAQLQNANKVIQNLKSRVRSLSVTSDYSSSLERPRKLRAVGTLEGSSPHSVPDEDEGWLSDGTGAFYSPGLQAKKDLESLIQRVSQLEAQLPKNGLEEKLAEELRSASWPGKYDSLIQDQARELSYLRQKIREGRGICYLITRHAKDTVKSFEDLLRSNDIDYYLGQSFREQLAQGSQLTERLTSKLSTKDHKSEKDQAGLEPLALRLSRELQEKEKVIEVLQAKLDARSLTPSSSHALSDSHRSPSSTSFLSDELEACSDMDIVSEYTHYEEKKASPSHSGFHFHSIPKLASLPQAPLPSAPSSFLPFSPTGPLLLGCCETPVVSLAEAQQELQMLQKQLGESASTVPPASTATLLSNDLEADSSYYLNSAQPHSPPRGTIELGRILEPGYLGSSGKWDVMRPQKGSVSGDLSSGSSVYQLNSKPTGADLLEEHLGEIRNLRQRLEESICINDRLREQLEHRLTSTARGRGSTSNFYSQGLESIPQLCNENRVLREDNRRLQAQLSHVSREHSQETESLREALLSSRSHLQELEKELEHQKVERQQLLEDLREKQQEVLHFREERLSLQENDSRLQHKLVLLQQQCEEKQQLFESLQSELQIYEALYGNSKKGLKAYSLDACHQIPLSSDLSHLVAEVRALRGQLEQSIQGNNCLRLQLQQQLESGAGKASLSPSSINQNFPASTDPGNKQLLLQDSAVSPPVRDVGMNSPALVFPSSASSTPGSETPIINRANGLGLDTSPVMKTPPKLEGDATDGSFANKHGRHVIGHIDDYSALRQQIAEGKLLVKKIVSLVRSACSFPGLEAQGTEVLGSKGIHELRSSTSALHHALEESASLLTMFWRAALPSTHIPVLPGKVGESTERELLELRTKVSKQERLLQSTTEHLKNANQQKESMEQFIVSQLTRTHDVLKKARTNLEVKSLRALPCTPAL

SEQ ID NO: 3730 - protein, 1637 aa, Homo sapiens
MEDEERQKKLEAGKAKVGELIFFFLAQFRQRKAQSDGQSPSKKQKKKRKTSSSKHDVSAHHDLNIDQSQCNEMYINSSQRVESTVIPESTIMRTLHSGEITSHEQGFSVELESEISTTADDCSSEVNGCSFVMRTGKPTNLLREEEFGVDDSYSEQGAQDSPTHLEMMESELAGKQHEIEELNRELEEMRVTYGTEGLQQLQEFEAAIKQRDGIITQLTANLQQARREKDETMREFLELTEQSQKLQIQFQQLQASETLRNSTHSSTAADLLQAKQQILTHQQQLEEQDHLLEDYQKKKEDFTMQISFLQEKIKVYEMEQDKKVENSNKEEIQEKETIIEELNTKIIEEEKKTLELKDKLTTADKLLGELQEQIVQKNQEIKNMKLELTNSKQKERQSSEEIKQLMGTVEELQKRNHKDSQFETDIVQRMEQETQRKLEQLRAELDEMYGQQIVQMKQELIRQHMAQMEEMKTRHKGEMENALRSYSNITVNEDQIKLMNVAINELNIKLQDTNSQKEKLKEELGLILEEKCALQRQLEDLVEELSFSREQIQRARQTIAEQESKLNEAHKSLSTVEDLKAEIVSASESRKELELKHEAEVTNYKIKLEMLEKEKNAVLDRMAESQEAELERLRTQLLFSHEEELSKLKEDLEIEHRINIEKLKDNLGIHYKQQIDGLQNEMSQKIETMQFEKDNLITKQNQLILEISKLKDLQQSLVNSKSEEMTLQINELQKEIEILRQEEKEKGTLEQEVQELQLKTELLEKQMKEKENDLQEKFAQLEAENSILKDEKKTLEDMLKIHTPVSQEERLIFLDSIKSKSKDSVWEKEIEILIEENEDLKQQCIQLNEEIEKQRNTFSFAEKNFEVNYQELQEEYACLLKVKDDLEDSKNKQELEYKSKLKALNEELHLQRINPTTVKMKSSVFDEDKTFVAETLEMGEVVEKDTTELMEKLEVTKREKLELSQRLSDLSEQLKQKHGEISFLNEEVKSLKQEKEQVSLRCRELEIIINHNRAENVQSCDTQVSSLLDGVVTMTSRGAEGSVSKVNKSFGEESKIMVEDKVSFENMTVGEESKQEQLILDHLPSVTKESSLRATQPSENDKLQKELNVLKSEQNDLRLQMEAQRICLSLVYSTHVDQVREYMENEKDKALCSLKEELIFAQEEKIKELQKIHQLELQTMKTQETGDEGKPLHLLIGKLQKAVSEECSYFLQTLCSVLGEYYTPALKCEVNAEDKENSGDYISENEDPELQDYRYEVQDFQENMHTLLNKVTEEYNKLLVLQTRLSKIWGQQTDGMKLEFGEENLPKEETEFLSIHSQMTNLEDIDVNHKSKLSSLQDLEKTKLEEQVQELESLISSLQQQLKETEQNYEAEIHCLQKRLQAVSESTVPPSLPVDSVVITESDAQRTMYPGSCVKKNIDGTIEFSGEFGVKEETNIVKLLEKQYQEQLEEEVAKVIVSMSIAFAQQTELSRISGGKENTASSKQAHAVCQQEQHYFNEMKLSQDQIGFQTFETVDVKFKEEFKPLSKELGEHGKEILLSNSDPHDIPESKDCVLTISEEMFSKDKTFIVRQSIHDEISVSSMDASRQLMLNEEQLEDMRQELVRQYQEHQQATELLRQAHMRQMERQREDQEQTRRD

SEQ ID NO: 3731 - protein, 468 aa, Homo sapiens
MLPPWTLGLLLLATVRGKEVCYGQLGCFSDEKPWAGTLQRPVKLLPWSPEDIDTRFLLYTNENPNNFQLITGTEPDTIEASNFQLDRKTRFIIHGFLDKAEDSWPSDMCKKMFEVEKVNCICVDWRHGSRAMYTQAVQNIRVVGAETAFLIQALSTQLGYSLEDVHVIGHSLGAHTAAEAGRRLGGRVGRITGLDPAGPCFQDEPEEVRLDPSDAVFVDVIHTDSSPIVPSLGFGMSQKVGHLDFFPNGGKEMPGCKKNVLSTITDIDGIWEGIGGFVSCNHLRSFEYYSSSVLNPDGFLGYPCASYDEFQESKCFPCPAEGCPKMGHYADQFKGKTSAVEQTFFLNTGESGNFTSRYKISVTLSGKEKVNGYIRIALYGSNENSKQYEIFKGSLKPDASHTCAIDVDFNVGKIQKVKFLWNKRGINLSEPKLGASQITVQSGEDGTEYNFCSSDTVEENVLQSLYPC

SEQ ID NO: 3732 - protein, 509 aa, Homo sapiens
MSGSSGPAPTPAVTKARRGDLTLQHGGGGRLGPRVGALTAAGGPCRKQLPPPPLSSLLGQGPGPGVQLDIASQSLDQEILLKVKTEIEEELKSLDKEISEAFTSTGFDRHTSPVFSPANPESSMEDCLAHLGEKVSQELKEPLHKALQMLLSQPVTYQAFRECTLETTVHASGWNKILVPLVLLRQMLLELTRRGQEPLSALLQFGVTYLEDYSAEYIIQQGGWGTVFSLESEEEEYPGITAEDSNDIYILPSDNSGQVSPPESPTVTTSWQSESLPVSLSASQSWHTESLPVSLGPESWQQIAMDPEEVKSLDSNGAGEKSENNSSNSDIVHVEKEEVPEGMEEAAVASVVLPARELQEALPEAPAPLLPHITATSLLGTREPDTEVITVEKSSPATSLFVELDEEEVKAATTEPTEVEEVVPALEPTETLLSEKEINAREESLVEELSPASEKKPVPPSEGKSRLSPAGEMKPMPLSEGKSILLFGGAAAVAILAVAIGVALALRKK

SEQ ID NO: 3733 - protein, 307 aa, Homo sapiens
MDDLMLSPDDIEQWFTEDPGPDEAPRMPEAAPPVAPAPAAPTPAAPAPAPSWPLSSSVPSQKTYQGSYGFRLGFLHSGTAKSVTCTYSPALNKMFCQLAKTCPVQLWVDSTPPPGTRVRAMAIYKQSQHMTEVVRRCPHHERCSDSDGLAPPQHLIRVEGNLRVEYLDDRNTFRHSVVVPYEPPEVGSDCTTIHYNYMCNSSCMGGMNRRPILTIITLEDSSGNLLGRNSFEVRVCACPGRDRRTEEENLRKKGEPHHELPPGSTKRALPNNTSSSPQPKKKPLDGEYFTLQMLLDLRWCYFLINSS

SEQ ID NO: 3734 - protein, 336 aa, Homo sapiens
MPLRDKYCQTDHHHHGCCEPVYILEPGDPPLLQQPLQTSKSGIQQIIECFRSGTKQLKHILLKDVDTIFECKLCRSLFRGLPNLITHKKFYCPPSLQMDDNLPDVNDKQSQAINDLLEAIYPSVDKREYIIKLEPIETNQNAVFQYISRTDNPIEVTESSSTPEQTEVQIQETSTEQSKTVPVTDTEVETVEPPPVEIVTDEVAPTSDEQPQESQADLETSDNSDFGHQLICCLCRKEFNSRRGVRRHIRKVHKKKMEELKKYIETRKNPNQSSKGRSKNVLVPLSRSCPVCCKSFATKANVRRHFDEVHRGLRRDSITPDIATKPGQPLFLDSIS

SEQ ID NO: 3735 - protein, 585 aa, Homo sapiens
MGPADSWGHHWMGILLSASLCTVWSPPAAAQLTLNANPLDATQSEDVVLPVFGTPRTPQIHGRSRELAKPSIAVSPGTAIEQKDMVTFYCTTKDVNITIHWVSNNLSIVFHERMQLSKDGKILTILIVQREDSGTYQCEARDALLSQRSDPIFLDVKYGPDPVEIKLESGVASGEVVEVMEGSSMTFLAETKSHPPCAYTWFLLDSILSHTTRTFTIHAVSREHEGLYRCLVSNSATHLSSLGTLKVRVLETLTMPQVVPSSLNLVENARSVDLTCQTVNQSVNVQWFLSGQPLLPSEHLQLSADNRTLIIHGLQRNDTGPYACEVWNWGSRARSEPLELTINYGPDQVHITRESASEMISTIEAELNSSLTLQCWAESKPGAEYRWTLEHSTGEHLGEQLIIRALTWEHDGIYNCTASNSLTGLARSTSVLVKVVGPQSSSLSSGAIAGIVIGILAVIAVASELGYFLCIRNARRPSRKTTEDPSHETSQPIPKEEHPTEPSSESLSPEYRNISQLQGRIRVELMQPPDLPEETYETKLPSASRRGNSFSPWKPPPKPLMPPLRLVSTVPKNMESIYEVLGMQQ

SEQ ID NO: 3736 - protein, 346 aa, Homo sapiens
MAPRRARGCRTLGLPALLLLLLLRPPATRDARDRLAVLAGRSRISESFNHEVQTHEACVRLRTMENCPQCHHHRTSRQQAGITCPPPMSVEHADIWVKSYSLYSRERYICNSGFKRKAGTSSLTECVLNKATNVAHWTTPSLKCIRDPALVHQRPAPPSTVTTAGVTPQPESLSPSGKEPAASSPSSNNTAATTAAIVPGSQLMPSKSPSTGTTEISSHESSHGTPSQTTAKNWELTASASHQPPGVYPQGHSDTTVAISTSTVLLCGLSAVSLLACYLKSSSHSRELTLLTLKWPKELLLLRRDISPALVEGAGQMPRASAPRQLQTGQPRMTSVLPRLCLSFGS

SEQ ID NO: 3737 - protein, 617 aa, Homo sapiens
MAGLTAAAPRPGVLLLLLSILHPSRPGGVPGAIPGGVPGGVFYPALGPGGKPLKPVPGGLAGAGLGAGLGAFPAVTFPGALVPGGVADAAAAYKAAKAGAGLGGVPGVGGLGVSAGAVVPQPGAGVKPGKVPGVGLPGVYPGGVLPGVGPFGGPQPGVPLGYPIKAPKLPGGYGLPYTTGKLPYGYGPGGVAGAAGKAGYPTGTGVGPQAAAAAAAKAAAKFGAGAAGVLPGVGGAGVPGVPGAIPGIGGIAGVGTPAAAAAAAAAAKAAKYGAAAGLVPGGPGFGPGVVGVPGAGVPGVGVPGAGIPVVPGAGIPGAAVPGVVSPEAAAKAAAKAAKYGARPGVGVGGIPTYGVGAGGFPGFGVGVGAEAQAAAAAKAAKYGLVPGVGVAPGVGVAPGVGVAPGVGLAPGVGVAPGVGVAPGVGVAPGIGPGGVAAAAKSAAKVAAKAQLRAAAGLGAGIPGLGVGVGVPGLGVGAGVPGLGVGAGVPGFGAVPGALAAAKAAKYGAAVPGVLGGLGALGGVGIPGGVVGAGPAAAAAAAKAAAKAAQFGLVGAAGLGGLGVGGLGVPGVGGLGGIPPAAAAKAAKYGVAARPGFGLSPIFPGGACLGKACGRKRK

SEQ ID NO: 3738 - protein, 150 aa, Homo sapiens
MATALVSAHSLAPLNLKKEGLRVVREDHYSTWEQGFKLQGNSKGLGQEPLCKQFRQLRYEETTGPREALSRLRELCQQWLQPETHTKEQILELLVLEQFLIILPKELQARVQEHHPESREDVVVVLEDLQLDLGETGQQDPDQPKKQKIL

SEQ ID NO: 3739 - protein, 617 aa, Homo sapiens
MNRKDSKRKSHQECTGKIGGRGRPRQVRRHKTCPSPREISKVMASMNLGLLSEGGCSEDELLEKCIQSFDSAGSLCHEDHMLNMVLAMHSWVLPSADLAARLLTSYQKATGDTQELRRLQICHLVRYWLMRHPEVMHQDPQLEEVIGRFWATVAREGNSAQRRLGDSSDLLSPGGPGPPLPMSSPGLGKKRKVSLLFDHLETGELAQHLTYLEFRSFQAITPQDLRSYVLQGSVRGCPALEGSVGLSNSVSRWVQVMVLSRPGPLQRAQVLDKFIHVAQRLHQLQNFNTLMAVTGGLCHSAISRLKDSHAHLSPDSTKALLELTELLASHNNYARYRRTWAGCAGFRLPVLGVHLKDLVSLHEAQPDRLPDGRLHLPKLNNLYLRLQELVALQGQHPPCSANEDLLHLLTLSLDLFYTEDEIYELSYAREPRCPKSLPPSPFNAPLVVEWAPGVTPKPDRVTLGRHVEQLVESVFKNYDPEGRGTISQEDFERLSGNFPFACHGLHPPPRQGRGSFSREELTGYLLRASAICSKLGLAFLHTFHEVTFRKPTFCDSCSGFLWGVTKQGYRCRGEWGVSEWEGSLGPQAGRMDDTDRTPAAAFPQSAGCVATNTAETR

SEQ ID NO: 3740 - protein, 4204 aa, Homo sapiens
MGALWSWWILWAGATLLWGLTQEASVDLKNTGREEFLTAFLQNYQLAYSKAYPRLLISSLSESPASVSILSQADNTSKKVTVRPGESVMVNISAKAEMIGSKIFQHAVVIHSDYAISVQALNAKPDTAELTLLRPIQALGTEYFVLTPPGTSARNVKEFAVVAGAAGASVSVTLKGSVTFNGKFYPAGDVLRVTLQPYNVAQLQSSVDLSGSKVTASSPVAVLSGHSCAQKHTTCNHVVEQLLPTSAWGTHYVVPTLASQSRYDLAFVVASQATKLTYNHGGITGSRGLQAGDVVEFEVRPSWPLYLSANVGIQVLLFGTGAIRNEVTYDPYLVLIPDVAAYCPAYVVKSVPGCEGVALVVAQTKAISGLTIDGHAVGAKLTWEAVPGSEFSYAEVELGTADMIHTAEATTNLGLLTFGLAKAIGYATAADCGRTVLSPVEPSCEGMQCAAGQRCQVVGGKAGCVAESTAVCRAQGDPHYTTFDGRRYDMMGTCSYTMVELCSEDDTLPAFSVEAKNEHRGSRRVSYVGLVTVRAYSHSVSLTRGEVGFVLVDNQRSRLPVSLSEGRLRVYQSGPRAVVELVFGLVVTYDWDCQLALSLPARFQDQVCGLCGNYNGDPADDFLTPDGALAPDAVEFASSWKLDDGDYLCEDGCQNNCPACTPGQAQHYEGDRLCGMLTKLDGPFAVCHDTLDPRPFLEQCVYDLCVVGGERLSLCRGLSAYAQACLELGISVGDWRSPANCPLSCPANSRYELCGPACPTSCNGAAAPSNCSGRPCVEGCVCLPGFVASGGACVPASSCGCTFQGLQLAPGQEVWADELCQRRCTCNGATHQVTCRDKQSCPAGERCSVQNGLLGCYPDRFGTCQGSGDPHYVSFDGRRFDFMGTCTYLLVGSCGQNAALPAFRVLVENEHRGSQTVSYTRAVRVEARGVKVAVRREYPGQVLVDDVLQYLPFQAADGQVQVFRQGRDAVVRTDFGLTVTYDWNARVTAKVPSSYAEALCGLCGNFNGDPADDLALRGGGQAANALAFGNSWQEETRPGCGATEPGDCPKLDSLVAQQLQSKNECGILADPKGPFRECHSKLDPQGAVRDCVYDRCLLPGQSGPLCDALATYAAACQAAGATVHPWRSEELCPLSCPPHSHYEACSYGCPLSCGDLPVPEGCESACREGCVCDAGFVLSGDTCVPVGQCGCLHDDRYYPLGQTFYPGPGCDSLCRCREGGEVSCEPSSCGPHETCRPSGGSLGCVAVGSTTCQASGDPHYTTFDGHRFDFMGTCVYVLAQTCGTRPGLHRFAVLQENVAWGNGRVSVTRVITVQVANFTLRLEQRQWKVTVNGVDMKLPVVLANGQIRASQHGSDVVIETDFGLRVAYDLVYYVRVTVPGNYYQLMCGLCGNYNGDPKDDFQKPNGSQAGNANEFGNSWEEVVSDSPCLPPPTCPPGSEGCIPSEECPPELEKKYQKEEFCGLLSSPTGPLSSCHKLVDPQGPLKDCIFDLCLGGGNLSILCSNIHAYVSACQVAGGHVEPWRNETFCPMECPQNSHYELCADTCSLGCSALSAPLQCPDGCAEGCQCDSGFLYNGQACVPIQQCGCYHNGAYYEPEQTVLIDNCRQQCTCHAGKVVVCQEHSCKPGQVCQPSGGILSCVTKDPCHGVTCRPQETCKEQGGQGVCLPNYEATCWLWGDPHYHSFDGRKFDFQGTCNYVLATTGCPGVSTQGLTPFTVTTKNQNRGNPAVSYVRVVTVAALGTNISIHKDEIGKVRVNGVLTALPVSVADGRISVTQGASKALLVADFGLQVSYDWNWRVDVTLPSSYHGAVCGLCGNMDRNPNNDQVFPNGTLAPSIPIWGGSWRAPGWDPLCWDECRGSCPTCPEDRLEQYEGPGFCGPLAPGTGGPFTTCHAHVPPESFFKGCVLDVCMGGGDRDILCKALASYVAACQAAGVVIEDWRAQVGCEITCPENSHYEVCGPPCPASCPSPAPLTTPAVCEGPCVEGCQCDAGFVLSADRCVPLNNGCGCWANGTYHEAGSEFWADGTCSQWCRCGPGGGSLVCTPASCGLGEVCGLLPSGQHGCQPVSTAECQAWGDPHYVTLDGHRFDFQGTCEYLLSAPCHGPPLGAENFTVTVANEHRGSQAVSYTRSVTLQIYNHSLTLSARWPRKLQVDGVFVTLPFQLDSLLHAHLSGADVVVTTTSGLSLAFDGDSFVRLRVPAAYAGSLCGLCGNYNQDPADDLKAVGGKPAGWQVGGAQGCGECVSKPCPSPCTPEQQESFGGPDACGVISATDGPLAPCHGLVPPAQYFQGCLLDACQVQGHPGGLCPAVATYVAACQAAGAQLREWRRPDFCPFQCPAHSHYELCGDSCPGSCPSLSAPEGCESACREGCVCDAGFVLSGDTCVPVGQCGCLHDDRYYPLGQTFYPGPGCDSLCRCREGGEVSCEPSSCGPHETCRPSGGSLGCVAVGSTTCQASGDPHYTTFDGHRFDFMGTCVYVLAQTCGTRPGLHRFAVLQENVAWGNGRVSVTRVITVQVANFTLRLEQRQWKVTVNGVDMKLPVVLANGQIRASQHGSDVVIETDFGLRVAYDLVYYVRVTVPGNYYQLMCGLCGNYNGDPKDDFQKPNGSQAGNANEFGNSWEEVVPDSPCLPPPTCPPGSAGCIPSDKCPPELEKKYQKEEFCGLLSSPTGPLSSCHKLVDPQGPLKDCIFDLCLGGGNLSILCSNIHAYVSACQAAGGHVEPWRNETFCPMECPQNSHYELCADTCSLGCSALSAPLQCPDGCAEGCQCDSGFLYNGQACVPIQQCGCYHNGVYYEPEQTVLIDNCRQQCTCHVGKVVVCQEHSCKPGQVCQPSGGILSCVTKDPCHGVTCRPQETCKEQGGQGVCLPNYEATCWLWGDPHYHSFDGRKFDFQGTCNYVLATTGCPGVSTQGLTPFTVTTKNQNRGNPAVSYVRVVTVAALGTNISIHKDEIGKVRVNGVLTALPVSVADGRISVAQGASKALLVADFGLQVSYDWNWRVDVTLPSSYHGAVCGLCGNMDRNPNNDQVFPNGTLAPSIPIWGGSWRAPGWDPLCWDECRGSCPTCPEDRLEQYEGPGFCGPLSSGTGGPFTTCHAHVPPESFFKGCVLDVCMGGGDRDILCKALASYVAACQAAGVVIEDWRAQVGCEITCPENSHYEVCGPPCPASCPSPAPLTTPAVCEGPCVEGCQCDAGFVLSADRCVPLNNGCGCWANGTYHEAGSEFWADGTCSQWCRCGPGGGSLVCTPASCGLGEVCGLLPSGQHGCQPVSTAECQAWGDPHYVTLDGHRFDFQGTCEYLLSAPCHGPPLGAENFTVTVANEHRGSQAVSYTRSVTLQIYNHSLTLSARWPRKLQVDGVFVALPFQLDSLLHAHLSGADVVVTTTSGLSLAFDGDSFVRLRVPAAYAASLCGLCGNYNQDPADDLKAVGGKPAGWQVGGAQGCGECVSKPCPSPCTPEQQESFGGPDACGVISATDGPLAPCHGLVPPAQYFQGCLLDACQVQGHPGGLCPAVATYVAACQAAGAQLGEWRRPDFCPLQCPAHSHYELCGDSCPVSCPSLSAPEGCESACREGCVCDAGFVLSGDTCVPVGQCGCLHDGRYYPLGEVFYPGPECERRCECGPGGHVTCQEGAACGPHEECRLEDGVQACHATGCGRCLANGGIHYITLDGRVYDLHGSCSYVLAQVCHPKPGDEDFSIVLEKNAAGDLQRLLVTVAGQVVSLAQGQQVTVDGEAVALPVAVGRVRVTAEGRNMVLQTTKGLRLLFDGDAHLLMSIPSPFRGRLCGLCGNFNGNWSDDFVLPNGSAASSVETFGAAWRAPGSSKGCGEGCGPQGCPVCLAEETAPYESNEACGQLRNPQGPFATCQAVLSPSEYFRQCVYDLCAQKGDKAFLCRSLAAYTAACQAAGVAVKPWRTDSFCPLHCPAHSHYSICTRTCQGSCAALSGLTGCTTRCFEGCECDDRFLLSQGVCIPVQDCGCTHNGRYLPVNSSLLTSDCSERCSCSSSSGLTCQAAGCPPGRVCEVKAEARNCWATRGLCVLSVGANLTTFDGARGATTSPGVYELSSRCPGLQNTIPWYRVVAEVQICHGKTEAVGQVHIFFQDGMVTLTPNKGVWVNGLRVDLPAEKLASVSVSRTPDGSLLVRQKAGVQVWLGANGKVAVIVSNDHAGKLCGACGNFDGDQTNDWHDSQEKPAMEKWRAQDFSPCYG

SEQ ID NO: 3741 - protein, 2725 aa, Homo sapiens
MNGHRFTFRTRSLLPLQKGQHRCITKLLAHNDPWGIFRAPSSRRSYSVSGVCQPAIPNSSLHIPHNACWLKWKLCSEIALPYHHILGERRKLCSIRNFEDWREDVRSCCQARVLPRGRTLGLWLALIGREEFAMNLLRRSGKRRRSESGSDSFSGSGGDSSASPQFLSGSVLSPPPGLGRCLKAAAAGECKPTVPDYERDKLLLANWGLPKAVLEKYHSFGVKKMFEWQAECLLLGQVLEGKNLVYSAPTSAGKTLVAELLILKRVLEMRKKALFILPFVSVAKEKKYYLQSLFQEVGIKVDGYMGSTSPSRHFSSLDIAVCTIERANGLINRLIEENKMDLLGMVVVDELHMLGDSHRGYLLELLLTKICYITRKSASCQADLASSLSNAVQIVGMSATLPNLELVASWLNAELYHTDFRPVPLLESVKVGNSIYDSSMKLVREFEPMLQVKGDEDHVVSLCYETICDNHSVLLFCPSKKWCEKLADIIAREFYNLHHQAEGEGLVKPSECPPVILEQKELLEVMDQLRRLPSGLDSVLQKTVPWGVAFHHAGLTFEERDIIEGAFRQGLIRVLAATSTLSSGVNLPARRVIIRTPIFGGRPLDILTYKQMVGRAGRKGVDTVGESILICKNSEKSKGIALLQGSLKPVRSCLQRREGEEVTGSMIRAILEIIVGGVASTSQDMHTYAACTFLAASMKEGKQGIQRNQESVQLGAIEACVMWLLENEFIQSTEASDGTEGKVYHPTHLGSATLSSSLSPADTLDIFADLQRAMKGFVLENDLHILYLVTPMFEDWTTIDWYRFFCLWEKLPTSMKRVAELVGVEEGFLARCVKGKVVARTERQHRQMAIHKRFFTSLVLLDLISEVPLREINQKYGCNRGQIQSLQQSAAVYAGMITVFSNRLGWHNMELLLSQFQKRLTFGIQRELCDLVRVSLLNAQRARVLYASGFHTVADLARANIVEVEVILKNAVPFKSARKAVDEEEEAVEERRNMRTIWVTGRKGLTEREAAALIVEEARMILQQDLVEMGVQWNPCALLHSSTCSLTHSESEVKEHTFISQTKSSYKKLTSKNKSNTIFSDSYIKHSPNIVQDLNKSREHTSSFNCNFQNGNQEHQTCSIFRARKRASLDINKEKPGASQNEGKTSDKKVVQTFSQKTKKAPLNFNSEKMSRSFRSWKRRKHLKRSRDSSPLKDSGACRIHLQGQTLSNPSLCEDPFTLDEKKTEFRNSGPFAKNVSLSGKEKDNKTSFPLQIKQNCSWNITLTNDNFVEHIVTGSQSKNVTCQATSVVSEKGRGVAVEAEKINEVLIQNGSKNQNVYMKHHDIHPINQYLRKQSHEQTSTITKQKNIIERQMPCEAVSSYINRDSNVTINCERIKLNTEENKPSHFQALGDDISRTVIPSEVLPSAGAFSKSEGQHENFLNISRLQEKTGTYTTNKTKNNHVSDLGLVLCDFEDSFYLDTQSEKIIQQMATENAKLGAKDTNLAAGIMQKSLVQQNSMNSFQKECHIPFPAEQHPLGATKIDHLDLKTVGTMKQSSDSHGVDILTPESPIFHSPILLEENGLFLKKNEVSVTDSQLNSFLQGYQTQETVKPVILLIPQKRTPTGVEGECLPVPETSLNMSDSLLFDSFSDDYLVKEQLPDMQMKEPLPSEVTSNHFSDSLCLQEDLIKKSNVNENQDTHQQLTCSNDESIIFSEMDSVQMVEALDNVDIFPVQEKNHTVVSPRALELSDPVLDEHHQGDQDGGDQDERAEKSKLTGTRQNHSFIWSGASFDLSPGLQRILDKVSSPLENEKLKSMTINFSSLNRKNTELNEEQEVISNLETKQVQGISFSSNNEVKSKIEMLENNANHDETSSLLPRKESNIVDDNGLIPPTPIPTSASKLTFPGILETPVNPWKTNNVLQPGESYLFGSPSDIKNHDLSPGSRNGFKDNSPISDTSFSLQLSQDGLQLTPASSSSESLSIIDVASDQNLFQTFIKEWRCKKRFSISLACEKIRSLTSSKTATIGSRFKQASSPQEIPIRDDGFPIKGCDDTLVVGLAVCWGGRDAYYFSLQKEQKHSEISASLVPPSLDPSLTLKDRMWYLQSCLRKESDKECSVVIYDFIQSYKILLLSCGISLEQSYEDPKVACWLLDPDSQEPTLHSIVTSFLPHELPLLEGMETSQGIQSLGLNAGSEHSGRYRASVESILIFNSMNQLNSLLQKENLQDVFRKVEMPSQYCLALLELNGIGFSTAECESQKHIMQAKLDAIETQAYQLAGHSFSFTSSDDIAEVLFLELKLPPNREMKNQGSKKTLGSTRRGIDNGRKLRLGRQFSTSKDVLNKLKALHPLPGLILEWRRITNAITKVVFPLQREKCLNPFLGMERIYPVSQSHTATGRITFTEPNIQNVPRDFEIKMPTLVGESPPSQAVGKGLLPMGRGKYKKGFSVNPRCQAQMEERAADRGMPFSISMRHAFVPFPGGSILAADYSQLELRILAHLSHDRRLIQVLNTGADVFRSIAAEWKMIEPESVGDDLRQQAKQICYGIIYGMGAKSLGEQMGIKENDAACYIDSFKSRYTGINQFMTETVKNCKRDGFVQTILGRRRYLPGIKDNNPYRKAHAERQAINTIVQGSAADIVKIATVNIQKQLETFHSTFKSHGHREGMLQSDQTGLSRKRKLQGMFCPIRGGFFILQLHDELLYEVAEEDVVQVAQIVKNEMESAVKLSVKLKVKVKIGASWGELKDFDV

SEQ ID NO: 3742 - protein, 470 aa, Homo sapiens
MAEQVLPQALYLSNMRKAVKIRERTPEDIFKPTNGIIHHFKTMHRYTLEMFRTCQFCPQFREIIHKALIDRNIQATLESQKKLNWCREVRKLVALKTNGDGNCLMHATSQYMWGVQDTDLVLRKALFSTLKETDTRNFKFRWQLESLKSQEFVETGLCYDTRNWNDEWDNLIKMASTDTPMARSGLQYNSLEEIHIFVLCNILRRPIIVISDKMLRSLESGSNFAPLKVGGIYLPLHWPAQECYRYPIVLGYDSHHFVPLVTLKDSGPEIRAVPLVNRDRGRFEDLKVHFLTDPENEMKEKLLKEYLMVIEIPVQGWDHGTTHLINAAKLDEANLPKEINLVDDYFELVQHEYKKWQENSEQGRREGHAQNPMEPSVPQLSLMDVKCETPNCPFFMSVNTQPLCHECSERRQKNQNKLPKLNSKPGPEGLPGMALGASRGEAYEPLAWNPEESTGGSFGPTDSTQPFSVQ

SEQ ID NO: 3743 - protein, 941 aa, Homo sapiens
MAAYLQWRRFVFFDKELVKEPLSNDGAAPGATPASGSAASKFLCLPPGITVCDSGRGSLVFGDMEGQIWFLPRSLQLTGFQAYKLRVTHLYQLKQHNILASVGEDEEGINPLVKIWNLEKRDGGNPLCTRIFPAIPGTEPTVVSCLTVHENLNFMAIGFTDGSVTLNKGDITRDRHSKTQILHKGNYPVTGLAFRQAGKTTHLFVVTTENVQSYIVSGKDYPRVELDTHGCGLRCSALSDPSQDLQFIVAGDECVYLYQPDERGPCFAFEGHKLIAHWFRGYLIIVSRDRKVSPKSEFTSRDSQSSDKQILNIYDLCNKFIAYSTVFEDVVDVLAEWGSLYVLTRDGRVHALQEKDTQTKLEMLFKKNLFEMAINLAKSQHLDSDGLAQIFMQYGDHLYSKGNHDGAVQQYIRTIGKLEPSYVIRKFLDAQRIHNLTAYLQTLHRQSLANADHTTLLLNCYTKLKDSSKLEEFIKKKSESEVHFDVETAIKVLRQAGYYSHALYLAENHAHHEWYLKIQLEDIKNYQEALRYIGKLPFEQAESNMKRYGKILMHHIPEQTTQLLKGLCTDYRPSLEGRSDREAPGCRANSEEFIPIFANNPRELKAFLEHMSEVQPDSPQGIYDTLLELRLQNWAHEKDPQVKEKLHAEAISLLKSGRFCDVFDKALVLCQMHDFQDGVLYLYEQGKLFQQIMHYHMQHEQYRQVISVCERHGEQDPSLWEQALSYFARKEEDCKEYVAAVLKHIENKNLMPPLLVVQTLAHNSTATLSVIRDYLVQKLQKQSQQIAQDELRVRRYREETTRIRQEIQELKASPKIFQKTKCSICNSALELPSVHFLCGHSFHQHCFESYSESDADCPTCLPENRKVMDMIRAQEQKRDLHDQFQHQLKCSNDSFSVIADYFGRGVFNKLTLLTDPPTARLTSSLEAGLQRDLLMHSRRGT

SEQ ID NO: 3744 - protein, 588 aa, Homo sapiens
MEPPDAPAQARGAPRLLLLAVLLAAHPDAQAEVRLSVPPLVEVMRGKSVILDCTPTGTHDHYMLEWFLTDRSGARPRLASAEMQGSELQVTMHDTRGRSPPYQLDSQGRLVLAEAQVGDERDYVCVVRAGAAGTAEATARLNVFAKPEATEVSPNKGTLSVMEDSAQEIATCNSRNGNPAPKITWYRNGQRLEVPVEMNPEGYMTSRTVREASGLLSLTSTLYLRLRKDDRDASFHCAAHYSLPEGRHGRLDSPTFHLTLHYPTEHVQFWVGSPSTPAGWVREGDTVQLLCRGDGSPSPEYTLFRLQDEQEEVLNVNLEGNLTLEGVTRGQSGTYGCRVEDYDAADDVQLSKTLELRVAYLDPLELSEGKVLSLPLNSSAVVNCSVHGLPTPALRWTKDSTPLGDGPMLSLSSITFDSNGTYVCEASLPTVPVLSRTQNFTLLVQGSPELKTAEIEPKADGSWREGDEVTLICSARGHPDPKLSWSQLGGSPAEPIPGRQGWVSSSLTLKVTSALSRDGISCEASNPHGNKRHVFHFGTVSPQTSQAGVAVMAVAVSVGLLLLVVAVFYCVRRKGGPCCRQRREKGAP

SEQ ID NO: 3745 - protein, 446 aa, Homo sapiens
MGLEALVPLAMIVAIFLLLVDLMHRHQRWAARYPPGPLPLPGLGNLLHVDFQNTPYCFDQLRRRFGDVFSLQLAWTPVVVLNGLAAVREAMVTRGEDTADRPPAPIYQVLGFGPRSQGRPFRPNGLLDKAVSNVIASLTCGRRFEYDDPRFLRLLDLAQEGLKEESGFLREVLNAVPVLPHIPALAGKVLRFQKAFLTQLDELLTEHRMTWDPAQPPRDLTEAFLAKKEKAKGSPESSFNDENLRIVVGNLFLAGMVTTSTTLAWGLLLMILHLDVQLRVQQEIDDVIGQVRRPEMGDQAHMPCTTAVIHEVQHFGDIVPLGVTHMTSRDIEVQGFRIPKGTTLITNLSSVLKDEAVWKKPFRFHPEHFLDAQGHFVKPEAFLPFSAGRRACLGEPLARMELFLFFTSLLQHFSFSVAAGQPRPSHSRVVSFLVTPSPYELCAVPR

SEQ ID NO: 3746 - protein, 449 aa, Homo sapiens
MSDWGQGFPQDPPDTSPSEGTNLNAPNSLGVSALCAICGDRATGKHYGASSCDGCKGFFRRSVRKNHMYSCRFSRQCVVDKDKRNQCRYCRLKKCFRAGMKKEAVQNERDRISTRRSSYEDSSLPSINALLQAEVLSRQITSPVSGINGDIRAKKIASIADVCESMKEQLLVLVEWAKYIPAFCELPLDDQVALLRAHAGEHLLLGATKRSMVFKDVLLLGNDYIVPRHCPELAEMSRVSIRILDELVLPFQELQIDDNEYAYLKAIIFFDPDAKGLSDPGKIKRLRSQVQVSLEDYINDRQYDSRGRFGELLLLLPTLQSITWQMIEQIQFIKLFGMAKIDNLLQEMLLGGSPSDAPHAHHPLHPHLMQEHMGTNVIVANTMPTHLSNGQMCEWPRPRGQAATPETPQPSPPGGSGSEPYKLLPGAVATIVKPLSAIPQPTITKQEVI

SEQ ID NO: 3747 - protein, 216 aa, Homo sapiens
MSALGQITITVSRCWNTERNQTDKNPCLHGAYLQLRETVKNKSTHLKKPLMKQAPPWKDHLTFQPLHPAERKTQVWRWQSGNSSDLETTSSASPWPTGSNRDVVLNTLAESCCGLSELITAPPYAGVSIQGFSQIWVLFPFCGGTFHHNEKDVLGLQDFERESVSTSQSRNISLLTLGQLQNCVIGKLTIIDLLTEHLLGVRHGVICFPWGLPSSS

SEQ ID NO: 3748 - protein, 944 aa, Homo sapiens
MSLTIRAPSVDYRNTLGLCGTFDENPENDFHDKNGMQIDQNFNNYVAFINEWRILPGKSMSDTLPVSMTSPGKPSYCSCSLDTAAYPSSEDLDSVSRSEIALGCKDLNHVSLSSLIPELDVTSEYINSDTLVREINKHTSPEEYNLNLFLQEKKHINLTKLGLNVQKHPGNEKEDSLQYLANKKYTQGRGSHSQEMRYNRQNRWKRQNFHEFPPLFAFPSLSQTDLEELTYFFPEDHAEDVQQEFFPSWPTPSGLTEYSTLTLCQETLANSSIGRLCLAFLGKRLDSVIEMCVKDVLLKDDLSWAEAGVALLENECEKRIVEEGKYNTEEYGTSIEDILSVLKCPNLCSGNGQCMEWGCACSPSFSSYDCSDSYDKAPEITELGNAGFCDVQKYNCMMVRVFGKGFKELPSIKCEVTKLQYNSSEWMPGEPIYTQTVFHNSRAVDCQLPTDVQQFDTMDLVGGKPTGKWQLKVSNDGYKFSNPKITVIYDGACQVCGLYKNDSCTIKENVCIIDGLCYVEGDKNPTSPCLICRPKISRFTWSFLENNQPPVIQALQDKLQTFYGENFEYQFVAFDPEGSDIHFTLDSGPEGASVSSAGLFMWKTDLLTTQQITVRLNDDCDAETRVTIEVTVKSCDCLNGGSCVSDRNFSPGSGVYLCVCLPGFHGSLCEVDISGCQSNPCGLGSYISGFHSYSCDCPPELKVETQFVNQFTTQTVVLTRSDKSVNKEEDDKNAQGRKRHVKPTSGNAFTICKYPCGKSRECVAPNICKCKPGYIGSNCQTALCDPDCKNHGKCIKPNICQCLPGHGGATCDEEHCNPPCQHGGTCLAGNLCTCPYGFVGPRCETMVCNRHCENGGQCLTPDICQCKPGWYGPTCSTALCDPVCLNGGSCNKPNTCLCPNGFFGEHCQNAFCHPPCKNGGHCMRNNVCVCREGYTGRRFQKRHL

SEQ ID NO: 3749 - protein, 669 aa, Homo sapiens
MAEQVLPQALYLSNMRKAVKIRERTPEDIFKPTNGIIHHFKTMHRYTLEMFRTCQFCPQFREIIHKALIDRNIQATLESQKKLNWCREVRKLVALKTNGDGNCLMHATSQYMWGVQDTDLVLRKALFSTLKETDTRNFKFRWQLESLKSQEFVETGLCYDTRNWNDEWDNLIKMASTDTPMARSGLQYNSLEEIHIFVLCNILRRPIIVISDKMLRSLESGSNFAPLKVGGIYLPLHWPAQECYRYPIVLGYDSHHFVPLVTLKDSGPEIRAVPLVNRDRGRFEDLKVHFLTDPENEMKEKLLKEYLMVIEIPVQGWDHGTTHLINAAKLDEANLPKEINLVDDYFELVQHEYKKWQENSEQGRREGHAQNPMEPSVPQLSLMDVKCETPNCPFFMSVNTQPLCHECSERRQKNQNKLPKLNSKPGPEGLPGMALGASRGEAYEPLAWNPEESTGGPHSAPPTAPSPFLFSETTAMKCRSPGCPFTLNVQHNGFCERCHNARQLHASHAPDHTRHLDPGKCQACLQDVTRTFNGICSTCFKRTTAEASSSLSTSLPPSCHQRSKSDPSRLVRSPSPHSCHRAGNDAPAGCLSQAARTPGDRTGTSKCRKAGCVYFGTPENKGFCTLFHRVQRKQTFCCCLRESQSHSVQVPEHHSVPGEGMRHPWKHHV

SEQ ID NO: 3750 - protein, 479 aa, Homo sapiens
MATALVSAHSLAPLNLKKEGLRVVREDHYSTWEQGFKLQGNSKGLGQEPLCKQFRQLRYEETTGPREALSRLRELCQQWLQPETHTKEQILELLVLEQFLIILPKELQARVQEHHPESREDVVVVLEDLQLDLGETGQQVDPDQPKKQKILVEEMAPLKGVQEQQVRHECEVTKPEKEKGEETRIENGKLIVVTDSCGRVESSGKISEPMEAHNEGSNLERHQAKPKEKIEYKCSEREQRFIQHLDLIEHASTHTGKKLCESDVCQSSSLTGHKKVLSREKGHQCHECGKAFQRSSHLVRHQKIHLGEKPYQCNECGKVFSQNAGLLEHLRIHTGEKPYLCIHCGKNFRRSSHLNRHQRIHSQEEPCECKECGKTFSQALLLTHHQRIHSHSKSHQCNECGKAFSLTSDLIRHHRIHTGEKPFKCNICQKAFRLNSHLAQHVRIHNEEKPYQCSECGEAFRQRSGLFQHQRYHHKDKLA

SEQ ID NO: 3751 - protein, 702 aa, Homo sapiens
MRLPDLRPWTSLLLVDAALLWLLQGPLGTLLPQGLPGLWLEGTLRLGGLWGLLKLRGLLGFVGTLLLPLCLATPLTVSLRALVAGASRAPPARVASAPWSWLLVGYGAAGLSWSLWAVLSPPGAQEKEQDQVNNKVLMWRLLKLSRPDLPLLVAAFFFLVLAVLGETLIPHYSGRVIDILGGDFDPHAFASAIFFMCLFSFGSSLSAGCRGGCFTYTMSRINLRIREQLFSSLLRQDLGFFQETKTGELNSRLSSDTTLMSNWLPLNANVLLRSLVKVVGLYGFMLSISPRLTLLSLLHMPFTIAAEKVYNTRHQEVLREIQDAVARAGQVVREAVGGLQTVRSFGAEEHEVCRYKEALEQCRQLYWRRDLERALYLLVRRVLHLGVQMLMLSCGLQQMQDGELTQGSLLSFMIYQESVGSYVQTLVYIYGDMLSNVGAAEKVFSYMDRQPNLPSPGTLAPTTLQGVVKFQDVSFAYPNRPDRPVLKGLTFTLRPGEVTALVGPNGSGKSTVAALLQNLYQPTGGQVLLDEKPISQYEHCYLHSQVVSVGQEPVLFSGSVRNNIAYGLQSCEDDKVMAAAQAAHADDFIQEMEHGIYTDVGEKGSQLAAGQKQRLAIARALVRDPRVLILDEATSALDVQCEQALQDWNSRGDRTVLVIAHRLQTVQRAHQILVLQEGKLQKLAQLEGQDLYSRLVQQRLMD

SEQ ID NO: 3752 - protein, 517 aa, Homo sapiens [sequence omitted]

SEQ ID NO: 3753 - protein, 931 aa, Homo sapiens
MKSVCRRGPCRAPLWFSWSSRVVLWSTGRKKEVHLLTCYQLSNPGRLLDYPAHMEGQIWFLPRSLQLTGFQAYKLRVTHLYQLKQHNILASVGEDEEGINPLVKIWNLEKRDGGNPLCTRIFPAIPGTEPTVVSCLTVHENLNFMAIGFTDGSVTLNKGDITRDRHSKTQILHKGNYPVTGLAFRQAGKTTHLFVVTTENVQSYIVSGKDYPRVELDTHGCGLRCSALSDPSQDLQFIVAGDECVYLYQPDERGPCFAFEGHKLIAHWFRGYLIIVSRDRKVSPKSEFTSRDSQSSDKQILNIYDLCNKFIAYSTVFEDVVDVLAEWGSLYVLTRDGRVHALQEKDTQTKLEMLFKKNLFEMAINLAKSQHLDSDGLAQIFMQYGDHLYSKGNHDGAVQQYIRTIGKLEPSYVIRKFLDAQRIHNLTAYLQTLHRQSLANADHTTLLLNCYTKLKDSSKLEEFIKKKSESEVHFDVETAIKVLRQAGYYSHALYLAENHAHHEWYLKIQLEDIKNYQEALRYIGKLPFEQAESNMKRYGKILMHHIPEQTTQLLKGLCTDYRPSLEGRSDREAPGCRANSEEFIPIFANNPRELKAFLEHMSEVQPDSPQGIYDTLLELRLQNWAHEKDPQVKEKLHAEAISLLKSGRFCDVFDKALVLCQMHDFQDGVLYLYEQGKLFQQIMHYHMQHEQYRQVISVCERHGEQDPSLWEQALSYFARKEEDCKEYVAAVLKHIENKNLMPPLLVVQTLAHNSTATLSVIRDYLVQKLQKQSQQIAQDELRVRRYREETTRIRQEIQELKASPKIFQKTKCSICNSALELPSVHFLCGHSFHQHCFESYSESDADCPTCLPENRKVMDMIRAQEQKRDLHDQFQHQLKCSNDSFSVIADYFGRGVFNKLTLLTDPPTARLTSSLEAGLQRDLLMHSRRGT

SEQ ID NO: 3754 - protein, 491 aa, Homo sapiens
MGPADSWGHHWMGILLSASLCTVWSPPAAAQLTLNANPLDATQSEDVVLPVFGTPRTPQIHGRSRELAKPSIAVSPGTAIEQKDMVTFYCTTKDVNITIHWVSNNLSIVFHERMQLSKDGKILTILIVQREDSGTYQCEARDALLSQRSDPIFLDVKYGPDPVEIKLESGVASGEVVEVMEGSSMTFLAETKSHPPCAYTWFLLDSILSHTTRTFTIHAVSREHEGLYRCLVSNSATHLSSLGTLKVRVLETLTMPQVVPSSLNLVENARSVDLTCQTVNQSVNVQWFLSGQPLLPSEHLQLSADNRTLIIHGLQRNDTGPYACEVWNWGSRARSEPLELTINCPQSSSLSSGAIAGIVIGILAVIAVASELGYFLCIRNARRPSRKTTEDPSHETSQPIPKEEHPTEPSSESLSPEYRNISQLQGRIRVELTKLPSASRRGNSFSPWKPPPKPLMPPLRLVSTVPKNMESIYEELVNPEPNTYIQINPSV

SEQ ID NO: 3755 - protein, 241 aa, Homo sapiens
RLRFLRTNTLLGHLMGKALRDPTVTRRYYYSIKDISIGGRCVCHGHADACDAKDPTDPFSSPNLSGHNRQLPCCPSPDLHSSQAGTKAQDGDGRVGAANTPHLLCPVCLLSGAAEGTAEHPPPGSPSQDGQQPWCWHRHIPGPHPESSVRLQCTCQHNTCGGTCDRCCPGFNQQPWKPATANSANECQSCNCYGHATDCYYDPEVDRRRASQSLDGTYQGGGVCIDCQHHTTGVNCERCLP

SEQ ID NO: 3756 - protein, 1062 aa, Homo sapiens
LIAVFEEQEPLHKIESPSGNPADRQSPDAFETEVAAQLAAFKPIGGEIEVTPSALKLGTPLLVRRSSDPVPGPPADTQPSASHPGGQSLKLVVPDSTQNLEDREVLNGVQTELLTSPRTKDTLSDMTRTVEISGEGGPLGIHVVPFFSSLSGRILGLFIRGIEDNSRSKREGLFHENECIVKINNVDLVDKTFAQAQDVFRQAMKSPSVLLHVLPPQNREQYEKSVIGSLNIFGNNDGVLKTKVPPPVHGKSGLKTANLTGTDSPETDASASLQQNKSPRVPRLGGKPSSPSLSPLMGFGSNKNAKKIKIDLKKGPEGLGFTVVTRDSSIHGPGPIFVKNILPKGAAIKDGRLQSGDRILEVNGRDVTGRTQEELVAMLRSTKQGETASLVIARQEGHFLPRELKGEPDCCALSLETSEQLTFEIPLNDSGSAGLGVSLKGNKSRETGTDLGIFIKSIIHGGAAFKDGRLRMNDQLIAVNGESLLGKSNHEAMETLRRSMSMEGNIRGMIQLVILRRPERPMEDPAECGAFSKPCFENCQNAVTTSRRNDNSILHPLGTCSPQDKQKGLLLPNDGWAESEVPPSPTPHSALGLGLEDYSHSSGVDSAVYFPDQHINFRSVTPARQPESINLKASKSMDLVPDESKVHSLAGQKSDGLSDKSSHSGQGALNCESAPQGNSELEDMENKARKVKKTKEKEKKKEKGKLKVKEKKRKEENEDPERKIKKKGFGAMLRFGKKKEDKGGKAEQKGTLKHGGLREEELEKMKEERERIGAKHQELREKQARGLLDYATGAIGSVYDMDDDEMDPNYARVNHFREPCTSANVFRSPSPPRAGPFGYPRDGHPLSPERDHLEGLYAKVNKPYHPLVPADSGRPTGGSTDRIQKLRKEYYQARREGFPLYEDDEGRARPSEYDLLWVPGRGPDGNAHNLRFEGMERQYASLPRGGPADPVDYLPAAPRGLYKERELPYYPGAHPMHPPKGSYPRPTELRVADLRYPQHYPPPPAPQHKGPFRQDVPPSPPQHQRMPAYQETGRPGPRGGSPDQYPYRTQDSRQKNPMTAAV

SEQ ID NO: 3757 - protein, 1463 aa, Homo sapiens
MVSESDFSKDVAVQVLPLDKIEENNKQKANDIFISQYTMGQKDALRTVLKQKAQSMPVFKEVKVHLLEDAGIEKDAVTQETRISPSGIDSATTVAAATAAAIATAAPLIKVQSDLEAKVNSVTELLSKLQETDKHLQRVTEQQTSIQRKQEKLHCHDHEKQMNVFMEQHIRHLEKLQQQQIDIQTHFISAALKTSSFQPVSMPSSRAVEKYSVKPEHPNLGSCNPSLYNTFASKQAPLKEVEDTSFDKQKSPLETPAPRRFAPVPVSRDDELSKRENLLEEKENMEVSCHRGNVRLLEQILNNNDSLTRKSESSNTTSLTRSKIGWTPEKTNRFPSCEELETTKVTMQKSDDVLHDLGQKEKETNSMVQPKESLSMLKLPDLPQNSVKLQTTNTTRSVLKDAEKILRGVQNNKKVLEENLEAIIRAKDGAAMYSLINALSTNREMSEKIRIRKTVDEWIKTISAEIQDELSRTDYEQKRFDQKNQRTKKGQNMTKDIRTNTQDKTVNKSVIPRKHSQKQIEEHFRNLPMRGMPASSLQKERKEGLLKATTVIQDEDYMLQVYGKPVYQGHRSTLKKGPYLRFNSPSPKSRPQRPKVIERVKGTKVKSIRTQTDFYATKPKKMDSKMKHSVPVLPHGDQQYLFSPSREMPTFSGTLEGHLIPMAILLGQTQSNSDTMPPAGVIVSKPHPVTVTTSIPPSSRKVETGVKKPNIAIVEMKSEKKDPPQLTVQVLPSVDIDSISNSSADVLSPLSSPKEASLPPVQTWIKTPEIMKVDEEEVKFPGTNFDEIIDVIQEEEKCDEIPDSEPILEFNRSVKADSTKYNGPPFPPVASTFQPTADILDKVIERKETLENSLIQWVEQEIMSRIISGLFPVQQQIAPSISVSVSETSEPLTSDIVEGTSSGALQLFVDAGVPVNSNVIKHFVNEALAETIAVMLGDREAKKQGPVATGVSGDASTNETYLPARVCTPLPTPQPTPPCSPSSPAKECVLVKTPDSSPCDSDHDMAFPVKEICAEKGDDMPAIMLVNTPTVTPTTTPPPAAAVFTPTLSDISIDKLKVSSPELPKPWGDGDLPLEEENPNSPQEELHPRAIVMSVAKDEEPESMDFPAQPPPPEPVPFMPFPAGTKAPSPSQMPGSDSSTLESTLSVTVTETETLDKPISEGEILFSCGQKLAPKILEDIGLYLTNLNDSLSSTLHDAVEMEDDPPSEGQVIRMSHKKFHADAILSFAKQNQESAVSQQAVYHSEDLENSVGELSEGQRPQLTAAAENILMGHSLYMQPPVTNTQSLDQQCDPKPLSRQFDTVSGSIYEDSCASHGPMSLGELELEPNSKLVLPTTLLTAQENDVNLPVAAEDFSQYQLKQNQDVKQVEHKPSQSYLRVRNKSDIAPSQQQVSPGDMDRTQIELNPYLTCVFSGGKAVPLSASQMPPAKMSVMLPSVNLEDCSQSLSLSTMQEDMESSGADTF

SEQ ID NO: 3758 - protein, 596 aa, Homo sapiens
MGPADSWGHHWMGILLSASLCTVWSPPAAAQLTLNANPLDATQSEDVVLPVFGTPRTPQIHGRSRELAKPSIAVSPGTAIEQKDMVTFYCTTKDVNITIHWVSNNLSIVFHERMQLSKDGKILTILIVQREDSGTYQCEARDALLSQRSDPIFLDVKYGPDPVEIKLESGVASGEVVEVMEGSSMTFLAETKSHPPCAYTWFLLDSILSHTTRTFTIHAVSREHEGLYRCLVSNSATHLSSLGTLKVRVLETLTMPQVVPSSLNLVENARSVDLTCQTVNQSVNVQWFLSGQPLLPSEHLQLSADNRTLIIHGLQRNDTGPYACEVWNWGSRARSEPLELTINYGPDQVHITRESASEMISTIEAELNSSLTLQCWAESKPGAEYRWTLEHSTGEHLGEQLIIRALTWEHDGIYNCTASNSLTGLARSTSVLVKVVGPQSSSLSSGAIAGIVIGILAVIAVASELGYFLCIRNARRPSRKTTEDPSHETSQPIPKEEHPTEPSSESLSPEYRNISQLQGRIRVELMQPPDLPEETYETKLPSASRRGNSFSPWKPPPKPLMPPLRLVSTVPKNMESIYEELVNPEPNTYIQINPSV

SEQ ID NO: 3759 - protein, 235 aa, Homo sapiens [sequence omitted]

SEQ ID NO: 3760 - protein, 565 aa, Homo sapiens
MTVLEITLAVILTLLGLAILAILLTRWARCKQSEMYISRYSSEQSARLLDYEDGRGSRHAYHKVTLHMITERISKRDYTPSTNSLALSRSSIALPQGSMSSIKCLQTTEEPPSRTAGAMMQFTAPIQPELQDLSSSLKKPLCKLQDLLYNWIQCQIASSHNHTVHLQHPGPPMAPIIISQRTASQLAAPIRIPQVHTMDSSGKITLTPVVILTGYMDEELAKKSCSKIQILKCGGTARSQNSREENKEALKNDIIFTNSVESLKSAHIKEPEREGKGTDLEKDKIGMEVKVDSDAGIPKRQETQLKISDEYTTRTGSPNKEKCVRCTKRTGQVKKSESGVPKGQEAQVTKSGLVVLKGQEAQVEKSEMGVPRRQESQVKKSQSGVSKGQEAQVKKRESVVLKGQEAQVEKSELKVPKGQEGQVEKTEADVPKEQEVQEKKSEAGVLKGPESQVKNTEVSVPETLESQVKKSESGVLKGQEAQEKKESFEDKGNNDKEKERDAEKDPNKKEKGDKNTKGDKGKDKVKGKRESEINGEKSKGSKRRQIQEGSTTKKWKSKDKFFKGP

SEQ ID NO: 3761 - protein, 1381 aa, Homo sapiens
MGRHVATSCHVAWLLVLISGCWGQVNRLPFFTNHFFDTYLLISEDTPVGSSVTQLLAQDMDNDPLVFGVSGEEASRFFAVEPDTGVVWLRQPLDRETKSEFTVEFSVSDHQGVITRKVNIQVGDVNDNAPTFHNQPYSVRIPENTPVGTPIFIVNATDPDLGAGGSVLYSFQPPSQFFAIDSARGIVTVIRELDYETTQAYQLTVNATDQDKTRPLSTLANLAIIITDVQDMDPIFINLPYSTNIYEHSPPGTTVRIITAIDQDKGRPRGIGYTIVSGNTNSIFALDYISGVLTLNGLLDRENPLYSHGFILTVKGTELNDDRTPSDATVTTTFNILVIDINDNAPEFNSSEYSVAITELAQVGFALPLFIQVVDKDENLGLNSMFEVYLVGNNSHHFIISPTSVQGKADIRIRVAIPLDYETVDRYDFDLFANESVPDHVGYAKVKITLINENDNRPIFSQPLYNISLYENVTVGTSVLTVLATDNDAGTFGEVSYFFSDDPDRFSLDKDTGLIMLIARLDYELIQRFTLTIIARDGGGEETTGRVRINVLDVNDNVPTFQKDAYVGALRENEPSVTQLVRLRATDEDSPPNNQITYSIVSASAFGSYFDISLYEGYGVISVSRPLDYEQISNGLIYLTVMAMDAGNPPLNSTVPVTIEVFDENDNPPTFSKPAYFVSVVENIMAGATVLFLNATDLDRSREYGQESIIYSLEGSTQFRINARSGEITTTSLLDRETKSEYILIVRAVDGGVGHNQKTGIATVNITLLDINDNHPTWKDAPYYINLVEMTPPDSDVTTVVAVDPDLGENGTLVYSIQPPNKFYSLNSTTGKIRTTHAMLDRENPDPHEAELMRKIVVSVTDCGRPPLKATSSATVFVNLLDLNDNDPTFQNLPFVAEVLEGIPAGVSIYQVVAIDLDEGLNGLVSYRMPVGMPRMDFLINSSSGVVVTTTELDRERIAEYQLRVVASDAGTPTKSSTSTLTIHVLDVNDETPTFFPAVYNVSVSEDVPREFRVVWLNCTDNDVGLNAELSYFITGGNVDGKFSVGYRDAVVRTVVGLDRETTAAYMLILEAIDNGPVGKRHTGTATVFVTVLDVNDNRPIFLQSSYEASVPEDIPEGHSILQLKATDADEGEFGRVWYRILHGNHGNNFRIHVSNGLLMRGPRPLDRERNSSHVLIVEAYNHDLGPMRSSVRVIVYVEDINDEAPVFTQQQYSRLGLRETAGIGTSVIVVQATDRDSGDGGLVNYRILSGAEGKFEIDESTGLIITVNYLDYETKTSYMMNVSATDQAPPFNQGFCSVYITLLNELDEAVQFSNASYEAAILENLALGTEIVRVQAYSIDNLNQITYRFNAYTSTQAKALFKIDAITVRGWGQGAPFLPI

SEQ ID NO: 3762 - protein, 524 aa, Homo sapiens
MESPSAPPHRWCIPWQRLLLTASLLTFWNPPTTAKLTIESTPFNVAEGKEVLLLVHNLPQHLFGYSWYKGERVDGNRQIIGYVIGTQQATPGPAYSGREIIYPNASLLIQNIIQNDTGFYTLHVIKSDLVNEEATGQFRVYPEPPKPFITSNNSNPVEDEDAVALTCEPEIQNTTYLWWVNNQSLPVSPRLQLSNDNRTLTLLSVTRNDVGPYECGIQNELSVDHSDPVILNVLYGPDDPTISPSYTYYRPGVNLSLSCHAASNPPAQYSWLIDGNIQQHTQELFISNITEKNSGLYTCQANNSASGHSRTTVKTITVSAELPKPSISSNNSKPVEDKDAVAFTCEPEAQNTTYLWWVNGQSLPVSPRLQLSNGNRTLTLFNVTRNDARAYVCGIQNSVSANRSDPVTLDVLYGPDTPIISPPDSSYLSGANLNLSCHSASNPSPQYSWRINGIPQQHTQVLFIAKITPNNNGTYACFVSNLATGRNNSIVKSITVSASGTSPGLSAGATVGIMIGVLVGVALI

SEQ ID NO: 3763 - protein, 302 aa, Homo sapiens
MDDLMLSPDDIEQWFTEDPGPDEAPRMPEAAPPVAPAPAAPTPAAPAPAPSWPLSSSVPSQKTYQGSYGFRLGFLHSGTAKSVTCTYSPALNKMFCQLAKTCPVQLWVDSTPPPGTRVRAMAIYKQSQHMTEVVRRCPHHERCSDSDGLAPPQHLIRVEGNLRVEYLDDRNTFRHSVVVPYEPPEVGSDCTTIHYNYMCNSSCMGGMNRRPILTIITLEDSSGNLLGRNSFEVRVCACPGRDRRTEEENLRKKGEPHHELPPGSTKRALPNNTSSSPQPKKKPLDGEYFTLQDQTSFQKENC

SEQ ID NO: 3764 - protein, 1114 aa, Homo sapiens
MACPWKFLFKTKFHQYAMNGEKDINNNVEKAPCATSSPVTQDDLQYHNLSKQQNESPQPLVETGKKSPESLVKLDATPLSSPRHVRIKNWGSGMTFQDTLHHKAKGILTCRSKSCLGSIMTPKSLTRGPRDKPTPPDELLPQAIEFVNQYYGSFKEAKIEEHLARVEAVTKEIETTGTYQLTGDELIFATKQAWRNAPRCIGRIQWSNLQVFDARSCSTAREMFEHICRHVRYSTNNGNIRSAITVFPQRSDGKHDFRVWNAQLCIDLGWKPNGRDPELFEIPPDLVLEVAMEHPKYEWFRELELKWYALPAVANMLLEVGGLEFPGCPFNGWYMGTEIGVRDFCDVQRYNILEEVGRRMGLETHKLASLWKDQAVVEINIAVLHSFQKQNVTIMDHHSAAESFMKYMQNEYRSRGGCPADWIWLVPPMSGSITPVFHQEMLNYVLSPFYYYQVEAWKTHVWQDEKRRPKRREIPLKVLVKAVLFACMLMRKTMASRVRVTILFATETGKSEALAWDLGALFSCAFNPKVVCMDKYRLSCLEEERLLLVVTSTFGNGDCPGNGEKLKKSLFMLKELNNKFRYAVFGLGSSMYPRFCAFAHDIDQKLSHLGASQLTPMGEGDELSGQEDAFRSWAVQTFKAACETFDVRGKQHIQIPKLYTSNVTWDPHHYRLVQDSQPLDLSKALSSMHAKNVFTMRLKSRQNLQSPTSSRATILVELSCEDGQGLNYLPGEHLGVCPGNQPALVQGILERVVDGPTPHQTVRLEALDESGSYWVSDKRLPPCSLSQALTYFLDITTPPTQLLLQKLAQVATEEPERQRLEALCQPSEYSKWKFTNSPTFLEVLEEFPSLRVSAGFLLSQLPILKPRFYSISSSRDHTPTEIHLTVAVVTYHTRDGQGPLHHGVCSTWLNSLKPQDPVPCFVRNASGFHLPEDPSHPCILIGPGTGIAPFRSFWQQRLHDSQHKGVRGGRMTLVFGCRRPDEDHIYQEEMLEMAQKGVLHAVHTAYSRLPGKPKVYVQDILRQQLASEVLRVLHKEPGHLYVCGDVRMARDVAHTLKQLVAAKLKLNEEQVEDYFFQLKSQKRYHEDIFGAVFPYEAKKDRVAVQPSSLEMSAL

SEQ ID NO: 3765 - protein, 105 aa, Homo sapiens
MRSEKEGAGGLRAAVAARGPSGREKLSALEVQFHRDSQQQEAETPPTSSSGCGGGAGKPREEKRTALSKVVIRRLPPGLTKEQLEEQLRPLPAHDYFEFFAADLR

SEQ ID NO: 3766 - protein, 1888 aa, Homo sapiens
MFRQFYLWTCLASGIILGSLFEICLGQYDDDCKLARGGPPATIVAIDEESRNGTILVDNMLIKGTAGGPDPTIELSLKDNVDYWVLMDPVKQMLFLNSTGRVLDRDPPMNIHSIVVQVQCINKKVGTIIYHEVRIVVRDRNDNSPTFKHESYYATVNELTPVGTTIFTGFSGDNGATDIDDGPNGQIEYVIQYNPDDPTSNDTFEIPLMLTGNIVLRKRLNYEDKTRYFVIIQANDRAQNLNERRTTTTTLTVDVLDGDDLGPMFLPCVLVPNTRDCRPLTYQAAIPELRTPEELNPIIVTPPIQAIDQDRNIQPPSDRPGILYSILVGTPEDYPRFFHMHPRTAELSLLEPVNRDFHQKFDLVIKAEQDNGHPLPAFAGLHIEILDENNQSPYFTMPSYQGYILESAPVGATISDSLNLTSPLRIVALDKDIEDTKDPELHLFLNDYTSVFTVTQTGITRYLTLLQPVDREEQQTYTFSITAFDGVQESEPVIVNIQVMDANDNTPTFPEISYDVYVYTDMRPGDSVIQLTAVDADEGSNGEITYEILVGAQGDFIINKTTGLITIAPGVEMIVGRTYALTVQAADNAPPAERSTGILTLGKALDRESTDRYILIITASDGRPDGTSTATVNIVVTDVNDNAPVFDPYLPRNLSVVEEEANAFVGQVKATDPDAGINGQVHYSLGNFNNLFRITSNGSIYTAVKLNREVRDYYELVVVATDGAVHPRHSTLTLAIKVLDIDDNSPVFTNSTYTVLVEENLPAGTTILQIEAKDVDLGANVSYRIRSPEVKHFFALHPFTGELSLLRSLDYEAFPDQEASITFLVEAFDIYGTMPPGIATVTVIVKDMNDYPPVFSKRIYKGMVAPDAVKGTPITTVYAEDADPPGLPASRVRYRVDDVQFPYPASIFEVEEDSGRVITRVNLNEEPTTIFKLVVVAFDDGEPVMSSSATVKILVLHPGEIPRFTQEEYRPPPVSELATKGTMVGVISAAAINQSIVYSIVSGNEEDTFGINNITGVIYVNGPLDYETRTSYVLRVQADSLEVVLANLRVPSKSNTAKVYIEIQDENNHPPVFQKKFYIGGVSEDARMFTSVLRVKATDKDTGNYSVMAYRLIIPPIKEGKEGFVVETYTGLIKTAMLFHNMRRSYFKFQVIATDDYGKGLSGKADVLVSVVNQLDMQVIVSNVPPTLVEKKIEDLTEILDRYVQEQIPGAKVVVESIGARRHGDAFSLEDYTKCDLTVYAIDPQTNRAIDRNELFKFLDGKLLDINKDFQPYYGEGGRILEIRTPEAVTSIKKRGESLGYTEGALLALAFIIILCCIPAILVVLVSYRQVFKGRQAECTKTARIQAALPAAKPAVPAPAPVAAPPPPPPPPPGAHLYEELGDSSILSSLFLLYHFQQSRGNNSVSEDRKHQQVVMPFSSNTIEAHKSAHVDGSLKSNKLKSARKFTFLSDEDDLSAHNPLYKENISQVSTNSDISQRTDFVDPFSPKIQAKSKSLRGPREKIQRLWSQSVSLPRRLMRKVPNRPEIIDLQQWQGTRQKAENENTGICTNKRGSSNPLLTTEEANLTEKEEIRQGETLMIEGTEQLKSLSSDSSFCFPRPHFSFSTLPTVSRTVELKSEPNVISSPAECSLELSPSRPCVLHSSLSRRETPICMLPIETERNIFENFAHPPNISPSACPLPPPPPISPPSPPPAPAPLAPPPDISPFSLFCPPPSPPSIPLPLPPPTFFPLSVSTSGPPTPPLLPPFPTPLPPPPPSIPCPPPPSASFLSTECVCITGVKCTTNLMPAEKIKSSMTQLSTTTVCKTDPQREPKGILRHVKNLAELEKSVANMYSQIEKNYLRTNVSELQTMCPSEVTNMEITSEQNKGSLNNIVEGTEKQSHSQSTSL

SEQ ID NO: 3767 - protein, 1265 aa, Homo sapiens
MSTTVNVDSLAEYEKSQIKRALELGTVMTVFSFRKSTPERRTVQVIMETRQVAWSKTADKIEGFLDIMEIKEIRPGKNSKDFERAKAVRQKEDCCFTILYGTQFVLSTLSLAADSKEDAVNWLSGLKILHQEAMNASTPTIIESWLRKQIYSVDQTRRNSISLRELKTILPLINFKVSSAKFLKDKFVEIGAHKDELSFEQFHLFYKKLMFEQQKSILDEFKKDSSVFILGNTDRPDASAVYLHDFQRFLIHEQQEHWAQDLNKVRERMTKFIDDTMRETAEPFLFVDEFLTYLFSRENSIWDEKYDAVDMQDMNNPLSHYWISSSHNTYLTGDQLRSESSPEAYIRCLRMGCRCIELDCWDGPDGKPVIYHGWTRTTKIKFDDVVQAIKDHAFVTSSFPVILSIEEHCSVEQQRHMAKAFKEVFGDLLLTKPTEASADQLPSPSQLREKIIIKHKKLGPRGDVDVNMEDKKDEHKQQGELYMWDSIDQKWTRHYCAIADAKLSFSDDIEQTMEEEVPQDIPPTELHFGEKWFHKKVEKRTSAEKLLQEYCMETGGKDGTFLVRESETFPNDYTLSFWRSGRVQHCRIRSTMEGGTLKYYLTDNLTFSSIYALIQHYRETHLRCAEFELRLTDPVPNPNPHESKPWYYDSLSRGEAEDMLMRIPRDGAFLIRKREGSDSYAITFRARGKVKHCRINRDGRHFVLGTSAYFESLVELVSYYEKHSLYRKMRLRYPVTPELLERYNMERDINSLYDVSRMYVDPSEINPSMPQRTVKALYDYKAKRSDELSFCRGALIHNVSKEPGGWWKGDYGTRIQQYFPSNYVEDISTADFEELEKQIIEDNPLGSLCRGILDLNTYNVVKAPQGKNQKSFVFILEPKQQGDPPVEFATDRVEELFEWFQSIREITWKIDTKENNMKYWEKNQSIAIELSDLVVYCKPTSKTKDNLENPDFREIRSFVETKADSIIRQKPVDLLKYNQKGLTRVYPKGQRVDSSNYDPFRLWLCGSQMVALNFQTADKYMQMNHALFSLNGRTGYVLQPESMRTEKYDPMPPESQRKILMTLTVKVLGARHLPKLGRSIACPFVEVEICGAEYDNNKFKTTVVNDNGLSPIWAPTQEKVTFEIYDPNLAFLRFVVYEEDMFSDPNFLAHATYPIKAVKSGFRSVPLKNGYSEDIELASLLVFCEMRPVLESEEELYSSCRQLRRRQEELNNQLFLYDTHQNLRNANRDALVKEFSVNENQLQLYQEKCNKRLREKRVSNSKFYS

SEQ ID NO: 3768 - protein, 301 aa, Homo sapiens
MHPEPAPPPSRSSPELPPSGGSTTSGSRRSRRRSGDGEPPGAPPPPPSAVTYPDWIGQSYSEVMSLNEHSMQALSWRKLYLSRAKLKASSRTSALLSGFAMVAMVEVQLDADHDYPPGLLIAFSACTTVLVAVHLFALMISTCILPNIEAVSNVHNLNSVKESPHERMHRHIELAWAFSTVIGTLLFLAEVVLLCWVKFLPLKKQPGQPRPTSKPPASGAAANVSTSGITPGQAAAIASTTIMVPFGLIFIVFAVHFYRSLVSHKTDRQFQELNELAEFARLQDQLDHRGDHPLTPGSHYA

SEQ ID NO: 3769 - protein, 590 aa, Homo sapiens
METTHSFGNPSISVSTQQPPKKFAPVVAPKPKYNPYKQPGGEGDFLPPPPPPLDDSSALPSISGNFPPPPPLDEEAFKVQGNPGGKTLEERRSSLDAEIDSLTSILADLECSSPYKPRPPQSSTGSTASPPVSTPVTGHKRMVIPNQPPLTATKKSTLKPQPAPQAGPIPVAPIGTLKPQPQPVPASYTTASTSSRPTFNVQVKSAQPSPHYMAAPSSGQIYGSGPQGYNTQPVPVSGQCPPPSTRGGMDYAYIPPPGLQPEPGYGYAPNQGRYYEGYYAAGPGYGGRNDSDPTYGQQGHPNTWKREPGYTPPGAGNQNPPGMYPVTGPKKTYITDPVSAPCAPPLQPKGGHSGQLGPSSVAPSFRPEDELEHLTKKMLYDMENPPADEYFGRCARCGENVVGEGTGCTAMDQVFHVDCFTCIICNNKLRGQPFYAVEKKAYCEPCYINTLEQCNVCSKPIMERILRATGKAYHPHCFTCVMCHRSLDGIPFTVDAGGLIHCIEDFHKKFAPRCSVCKEPIMPAPGQEETVRIVALDRDFHVHCYRCEDCGGLLSEGDNQGCYPLDGHILCKTCNSARIRVLTAKASTDL

SEQ ID NO: 3770 - protein, 1294 aa, Homo sapiens
MELLPPLPQSFLLLLLLPAKPAAGEDWQCPRTPYAASRDFDVKYVVPSFSAGGLVQAMVTYEGDRNESAVFVAIRNRLHVLGPDLKSVQSLATGPAGDPGCQTCAACGPGPHGPPGDTDTKVLVLDPALPALVSCGSSLQGRCFLHDLEPQGTAVHLAAPACLFSAHHNRPDDCPDCVASPLGTRVTVVEQGQASYFYVASSLDAAVAASFSPRSVSIRRLKADASGFAPGFVALSVLPKHLVSYSIEYVHSFHTGAFVYFLTVQPASVTDDPSALHTRLARLSATEPELGDYRELVLDCRFAPKRRRRGAPEGGQPYPVLRVAHSAPVGAQLATELSIAEGQEVLFGVFVTGKDGGPGVGPNSVVCAFPIDLLDTLIDEGVERCCESPVHPGLRRGLDFFQSPSFCPNPVFQVPIQGPGCRHFLTCGRCLRAWHFMGCGWCGNMCGQQKECPGSWQQDHCPPKLTEFHPHSGPLRGSTRLTLCGSNFYLHPSGLVPEGTHQVTVGQSPCRPLPKDSSKLRPVPRKDFVEEFECELEPLGTQAVGPTNVSLTVTNMPPGKHFRVDGTSVLRGFSFMEPVLIAVQPLFGPRAGGTCLTLEGQSLSVGTSRAVLVNGTECLLARVSEGQLLCATPPGATVASVPLSLQVGGAQVPGSWTFQYREDPVVLSISPNCGYINSHITICGQHLTSAWHLVLSFHDGLRAVESRCERQLPEQQLCRLPEYVVRDPQGWVAGNLSARGDGAAGFTLPGFRFLPPPHPPSANLVPLKPEEHAIKFEYIGLGAVADCVGINVTVGGESCQHEFRGDMVVCPLPPSLQLGQDGAPLQVCVDGECHILGRVVRPGPDGVPQSTLLGILLPLLLLVAALATALVFSYWWRRKQLVLPPNLNDLASLDQTAGATPLPILYSGSDYRSGLALPAIDGLDSTTCVHGASFSDSEDESCVPLLRKESIQLRDLDSALLAEVKDVLIPHERVVTHSDRVIGKGHFGVVYHGEYIDQAQNRIQCAIKSLSRITEMQQVEAFLREGLLMRGLNHPNVLALIGIMLPPEGLPHVLLPYMCHGDLLQFIRSPQRNPTVKDLISFGLQVARGMEYLAEQKFVHRDLAARNCMLDESFTVKVADFGLARDILDREYYSVQQHRHARLPVKWMALESLQTYRFTTKSDVWSFGVLLWELLTRGAPPYRHIDPFDLTHFLAQGRRLPQPEYCPDSLYQVMQQCWEADPAVRPTFRVLVGEVEQIVSALLGDHYVQLPATYMNLGPSTSHEMNVRPEQPQFSPMPGNVRRPRPLSEPPRPT

SEQ ID NO: 3771 - protein, 1030 aa, Homo sapiens
LIAVFEEQEPLHKIESPSGNPADRQSPDAFETEVAAQLAAFKPIGGEIEVTPSALKLGTPLLVRRSSDPVPGPPADTQPSASHPGGQSLKLVVPDSTQNLEDREVLNGVQTELLTSPRTKDTLSDMTRTVEISGEGGPLGIHVVPFFSSLSGRILGLFIRGIEDNSRSKREGLFHENECIVKINNVDLVDKTFAQAQDVFRQAMKSPSVLLHVLPPQNREQYEKSVIGSLNIFGNNDGVLKTKVPPPVHGKSGLKTANLTGTDSPETDASASLQQNKSPRVPRLGGKPSSPSLSPLMGFGSNKNAKKIKIDLKKGPEGLGFTVVTRDSSIHGPGPIFVKNILPKGAAIKDGRLQSGDRILEVNGRDVTGRTQEELVAMLRSTKQGETASLVIARQEGHFLPRELKGEPDCCALSLETSEQLTFEIPLNDSGSAGLGVSLKGNKSRETGTDLGIFIKSIIHGGAAFKDGRLRMNDQLIAVNGESLLGKSNHEAMETLRRSMSMEGNIRGMIQLVILRRPERPMEDPAECGAFSKPCFENCQNAVTTSRRNDNSILHPLGTCSPQDKQKGLLLPNDGWAESEVPPSPTPHSALGLGLEDYSHSSGVDSAVYFPDQHINFRSVTPARQPESINLKASKSMDLVPDESKVHSLAGQKSESPSKDFGPTLGLKKSSSLESLQTAVAEVRKNDLPFHRPRPHMVRGRGCNESFRAAIDKSYDGPEEIEADGLSDKSSHSGQGALNCESAPQGNSELEDMENKARKVKKTKEKEKKKEKGKLKVKEKKRKEENEDPERKIKKKGFGAMLRFGKKKEDKGGKAEQKGTLKHGGLREEELEKMKEERESGRPTGGSTDRIQKLRKEYYQARREGFPLYEDDEGRARPSEYDLLWVPGRGPDGNAHNLRFEGMERQYASLPRGGPADPVDYLPAAPRGLYKERELPYYPGAHPMHPPKGSYPRPTELRVADLRYPQHYPPPPAPQHKGPFRQDVPPSPPQHQRMPAYQETGRPGPRGGSPDQYPYRTQDSRQKNPMTAAV

SEQ ID NO: 3772 - protein, 137 aa, Homo sapiens
MKVVNLKQAILQAWKERWSDYQWAINMKKFFPKGATWDILNLADALLEQAMIGPSPNPLILSYLKYAISSQMVSYSSVLTAISKFDDFSRDHKPSGHPCVRPPQPRSSLTSEELSRCKVCMCVCVCVCVCLCVFCNM

SEQ ID NO: 3773 - protein, 235 aa, Homo sapiens
MEEGERSPLLSQETAGQKPLSVHRPPTSGCLGPVPREDQAEAWGCSCCPPETKHQALSGTPKKGPAPSLSPGSSCVKYLIFLSNFPFSLLGLLALAIGLWGLAVKGSLGSDLGGPLPADPMLGLALGGLVVSAVSLAGYLGALCENTCLLRGFSGGILAFLVLEAVAGALVVALWGPLQDSLEHTLRVAIAHYQDDPDLRFLLDQVQLGLRCCGAASYQDWQQNLYCLSSPCSSQ

SEQ ID NO: 3774 - protein, 969 aa, Homo sapiens
MPPRAPPAPGPRPPPRAAAATDTAAGAGGAGGAGGAGGPGFRPLAPRPWRWLLLLALPAACSAPPPRPVYTNHWAVQVLGGPAEADRVAAAHGYLNLGQIGNLEDYYHFYHSKTFKRSTLSSRGPHTFLRMDPQVKWLQQQEVKRRVKRQVRSDPQALYFNDPIWSNMWYLHCGDKNSRCRSEMNVQAAWKRGYTGKNVVVTILDDGIERNHPDLAPNYDSYASYDVNGNDYDPSPRYDASNENKHGTRCAGEVAASANNSYCIVGIAYNAKIGGIRMLDGDVTDVVEAKSLGIRPNYIDIYSASWGPDDDGKTVDGPGRLAKQAFEYGIKKGRQGLGSIFVWASGNGGREGDYCSCDGYTNSIYTISVSSATENGYKPWYLEECASTLATTYSSGAFYERKIVTTDLRQRCTDGHTGTSVSAPMVAGIIALALEANSQLTWRDVQHLLVKTSRPAHLKASDWKVNGAGHKVSHFYGFGLVDAEALVVEAKKWTAVPSQHMCVAASDKRPRSIPLVQVLRTTALTSACAEHSDQRVVYLEHVVVRTSISHPRRGDLQIYLVSPSGTKSQLLAKRLLDLSNEGFTNWEFMTVHCWGEKAEGQWTLEIQDLPSQVRNPEKQGKLKEWSLILYGTAEHPYHTFSAHQSRSRMLELSAPELEPPKAALSPSQVEVPEDEEDYTAQSTPGSANILQTSVCHPECGDKGCDGPNADQCLNCVHFSLGSVKTSRKCVSVCPLGYFGDTAARRCRRCHKGCETCSSRAATQCLSCRRGFYHHQEMNTCVTLCPAGFYADESQKNCLKCHPSCKKCVDEPEKCTVCKEGFSLARGSCIPDCEPGTYFDSELIRCGECHHTCGTCVGPGREECIHCAKNFHFHDWKCVPACGEGFYPEEMPGLPHKVCRRCDENCLSCAGSSRNCSRCKTGFTQLGTSCITNHTCSNADETFCEMVKSNRLCERKLFIQFCCRTCLLAG

SEQ ID NO: 3775 - protein, 1790 aa, Homo sapiens
MFRQFYLWTCLASGIILGSLFEICLGQYDDDWQYEDCKLARGGPPATIVAIDEESRNGTILVDNMLIKGTAGGPDPTIELSLKDNVDYWVLMDPVKQMLFLNSTGRVLDRDPPMNIHSIVVQVQCINKKVGTIIYHEVRIVVRDRNDNSPTFKHESYYATVNELTPVGTTIFTGFSGDNGATDIDDGPNGQIEYVIQYNPDDPTSNDTFEIPLMLTGNIVLRKRLNYEDKTRYFVIIQANDRAQNLNERRTTTTTLTVDVLDGDDLGPMFLPCVLVPNTRDCRPLTYQAAIPELRTPEELNPIIVTPPIQAIDQDRNIQPPSDRPGILYSILVGTPEDYPRFFHMHPRTAELSLLEPVNRDFHQKFDLVIKAEQDNGHPLPAFAGLHIEILDENNQSPYFTMPSYQGYILESAPVGATISDSLNLTSPLRIVALDKDIEDVPPSGVPTKDPELHLFLNDYTSVFTVTQTGITRYLTLLQPVDREEQQTYTFSITAFDGVQESEPVIVNIQVMDANDNTPTFPEISYDVYVYTDMRPGDSVIQLTAVDADEGSNGEITYEILVGAQGDFIINKTTGLITIAPGVEMIVGRTYALTVQAADNAPPAERRNSICTVYIEVLPPNNQSPPRFPQLMYSLEISEAMRVGAVLLNLQATDREGDSITYAIENGDPQRVFNLSETTGILTLGKALDRESTDRYILIITASDGRPDGTSTATVNIVVTDVNDNAPVFDPYLPRNLSVVEEEANAFVGQVKATDPDAGINGQVHYSLGNFNNLFRITSNGSIYTAVKLNREVRDYYELVVVATDGAVHPRHSTLTLAIKVLDIDDNSPVFTNSTYTVLVEENLPAGTTILQIEAKDVDLGANVSYRIRSPEVKHFFALHPFTGELSLLRSLDYEAFPDQEASITFLVEAFDIYGTMPPGIATVTVIVKDMNDYPPVFSKRIYKGMVAPDAVKGTPITTVYAEDADPPGLPASRVRYRVDDVQFPYPASIFEVEEDSGRVITRVNLNEEPTTIFKLVVVAFDDGEPVMSSSATVKILVLHPGEIPRFTQEEYRPPPVSELATKGTMVGVISAAAINQSIVYSIVSGNEEDTFGINNITGVIYVNGPLDYETRTSYVLRVQADSLEVVLANLRVPSKSNTAKVYIEIQDENNHPPVFQKKFYIGGVSEDARMFTSVLRVKATDKDTGNYSVMAYRLIIPPIKEGKEGFVVETYTGLIKTAMLFHNMRRSYFKFQVIATDDYGKGLSGKADVLVSVVNQLDMQVIVSNVPPTLVEKKIEDLTEILDRYVQEQIPGAKVVVESIGARRHGDAFSLEDYTKCDLTVYAIDPQTNRAIDRNELFKFLDGKLLDINKDFQPYYGEGGRILEIRTPEAVTSIKKRGESLGYTEGALLALAFIIILCCIPAILVVLVSYRQFKVRQAECTKTARIQAALPAAKPAVPAPAPVAAPPPPPPPPPGAHLYEELGDSSMHKYEMPQYGSRRRLLPPAGQEEYGEVVGEAEEEYEEEEEEPKKIKKPKVEIREPSEEEEVVVTIEKPPAAEPTYTTWKRARIFPMIFKKVRGLADKRGIVDLEGEEWQRRLEEEDKDYLKLTLDQEEATESTVESEEESSSDYTEYSEEESEFSESETTEEESESETPSEEEESSTPESEESESTESEGEKARKNIVLARRRPMVEEVKEVKGRKEEPQEEQKEPKMEEEEHSEEEESGPAPVEESTDPEAQDIPEEGSAESASVEGGVESEEESESGSSSSSSESQSGGPWGYQVPAYDRSKNANQKKSPGANSEGYNTAL

SEQ ID NO: 3776 - protein, 158 aa, Homo sapiens
MSRRKQSNPRQIKRSLGDMEAREEVQLVGASHMEQKATAPEAPSPPSADVNSPPPLPPPTSPGGPKELEGQEPEPRPTEEEPGSPWSGPDELEPVVQDGQRRIRARLSLATGLSWGPFHGSVQTRASSPRQAEPMRKLRLQDVKSIAQIPRIKQQREK

SEQ ID NO: 3777 - protein, 382 aa, Homo sapiens
MEEPQSDPSVEPPLSQETFSDLWKLLPENNVLSPLPSQAMDDLMLSPDDIEQWFTEDPGPDEAPRMPEAAPPVAPAPAAPTPAAPAPAPSWPLSSSVPSQKTYQGSYGFRLSCKYSPALNKMFCQLAKTCPVQLWVDSTPPPGTRVRAMAIYKQSQHMTEVVRRCPHHERCSDSDGLAPPQHLIRVEGNLRVEYLDDRNTFRHSVVVPYEPPEVGSDCTTIHYNYMCNSSCMGGMNRRPILTIITLEDSSGNLLGRNSFEVRVCACPGRDRRTEEENLRKKGEPHHELPPGSTKRALPNNTSSSPQPKKKPLDGEYFTLQIRGRERFEMFRELNEALELKDAQAGKEPGGSRAHSSHLKSKKGQSTSRHKKLMFKTEGPDSD

SEQ ID NO: 3778 - protein, 1789 aa, Homo sapiens
MFRQFYLWTCLASGIILGSLFEICLGQYDDDWQYEDCKLARGGPPATIVAIDEESRNGTILVDNMLIKGTAGGPDPTIELSLKDNVDYWVLMDPVKQMLFLNSTGRVLDRDPPMNIHSIVVQVQCINKKVGTIIYHEVRIVVRDRNDNSPTFKHESYYATVNELTPVGTTIFTGFSGDNGATDIDDGPNGQIEYVIQYNPDDPTSNDTFEIPLMLTGNIVLRKRLNYEDKTRYFVIIQANDRAQNLNERRTTTTTLTVDVLDGDDLGPMFLPCVLVPNTRDCRPLTYQAAIPELRTPEELNPIIVTPPIQAIDQDRNIQPPSDRPGILYSILVGTPEDYPRFFHMHPRTAELSLLEPVNRDFHQKFDLVIKAEQDNGHPLPAFAGLHIEILDENNQSPYFTMPSYQGYILESAPVGATISDSLNLTSPLRIVALDKDIEDVPPSGVPTKDPELHLFLNDYTSVFTVTQTGITRYLTLLQPVDREEQQTYTFSITAFDGVQESEPVIVNIQVMDANDNTPTFPEISYDVYVYTDMRPGDSVIQLTAVDADEGSNGEITYEILVGAQGDFIINKTTGLITIAPGVEMIVGRTYALTVQAADNAPPAERRNSICTVYIEVLPPNNQSPPRFPQLMYSLEISEAMRVGAVLLNLQATDREGDSITYAIENGDPQRVFNLSETTGILTLGKALDRESTDRYILIITASDGRPDGTSTATVNIVVTDVNDNAPVFDPYLPRNLSVVEEEANAFVGQVKATDPDAGINGQVHYSLGNFNNLFRITSNGSIYTAVKLNREVRDYYELVVVATDGAVHPRHSTLTLAIKVLDIDDNSPVFTNSTYTVLVEENLPAGTTILQIEAKDVDLGANVSYRIRSPEVKHFFALHPFTGELSLLRSLDYEAFPDQEASITFLVEAFDIYGTMPPGIATVTVIVKDMNDYPPVFSKRIYKGMVAPDAVKGTPITTVYAEDADPPGLPASRVRYRVDDVQFPYPASIFEVEEDSGRVITRVNLNEEPTTIFKLVVVAFDDGEPVMSSSATVKILVLHPGEIPRFTQEEYRPPPVSELATKGTMVGVISAAAINQSIVYSIVSGNEEDTFGINNITGVIYVNGPLDYETRTSYVLRVQADSLEVVLANLRVPSKSNTAKVYIEIQDENNHPPVFQKKFYIGGVSEDARMFTSVLRVKATDKDTGNYSVMAYRLIIPPIKEGKEGFVVETYTGLIKTAMLFHNMRRSYFKFQVIATDDYGKGLSGKADVLVSVVNQLDMQVIVSNVPPTLVEKKIEDLTEILDRYVQEQIPGAKVVVESIGARRHGDAFSLEDYTKCDLTVYAIDPQTNRAIDRNELFKFLDGKLLDINKDFQPYYGEGGRILEIRTPEAVTSIKKRGESLGYTEGALLALAFIIILCCIPAILVVLVSYRQVFKGRQAECTKTARIQAALPAAKPAVPAPAPVAAPPPPPPPPPGAHLYEELGDSSMYEMPQYGSRRRLLPPAGQEEYGEVVGEAEEEYEEEEEEPKKIKKPKVEIREPSEEEEVVVTIEKPPAAEPTYTTWKRARIFPMIFKKVRGLADKRGIVDLEGEEWQRRLEEEDKDYLKLTLDQEEATESTVESEEESSSDYTEYSEEESEFSESETTEEESESETPSEEEESSTPESEESESTESEGEKARKNIVLARRRPMVEEVKEVKGRKEEPQEEQKEPKMEEEEHSEEEESGPAPVEESTDPEAQDIPEEGSAESASVEGGVESEEESESGSSSSSSESQSGGPWGYQVPAYDRSKNANQKKSPGANSEGYNTAL

SEQ ID NO: 3779 - protein, 503 aa, Homo sapiens
MGPADSWGHHWMGILLSASLCTVWSPPAAAQLTLNANPLDATQSEDVVLPVFGTPRTPQIHGRSRELAKPSIAVSPGTAIEQKDMVTFYCTTKDVNITIHWVSNNLSIVFHERMQLSKDGKILTILIVQREDSGTYQCEARDALLSQRSDPIFLDVKYGPDPVEIKLESGVASGEVVEVMEGSSMTFLAETKSHPPCAYTWFLLDSILSHTTRTFTIHAVSREHEGLYRCLVSNSATHLSSLGTLKVRVLETLTMPQVVPSSLNLVENARSVDLTCQTVNQSVNVQWFLSGQPLLPSEHLQLSADNRTLIIHGLQRNDTGPYACEVWNWGSRARSEPLELTINCPQSSSLSSGAIAGIVIGILAVIAVASELGYFLCIRNARRPSRKTTEDPSHETSQPIPKEEHPTEPSSESLSPEYRNISQLQGRIRVELMQPPDLPEETYETKLPSASRRGNSFSPWKPPPKPLMPPLRLVSTVPKNMESIYEELVNPEPNTYIQINPSV

SEQ ID NO: 3780 - protein, 337 aa, Homo sapiens
MVNAGAIVVSSLIKMDCNKAEKFDFVLQYLNKMAGNEYMGFSNATFQSEKETGDRNYAIGYYLKEKKCFPKGVDMMAALDLYFQLCSVEVTCESGSVMAATLANGGICPITGESVLSAEAVRNTLSLMHSCGMYDFSGQFAFHVGLPAKSAVSGAILLVVPNVMGMMCLSPPLDKLGNSHRGTSFCQKLVSLFNFHNYDNLRHCARKLDPRREGAEIRNKTVVNLLFAAYSGDVSALRRFALSAMDMEQKDYDSRTALHVAAAEGHIEVVKFLIEACKVNPFAKDRWGNIPLDDAVQFNHLEVVKLLQDYQDSYTLSETQAEAAAEALSKENLESMV

SEQ ID NO: 3781 - protein, 373 aa, Homo sapiens
MAEVLRTLAGKPKCHALRPMILFLIMLVLVLFGYGVLSPRSLMPGSLERGFCMAVREPDHLQRVSLPRMVYPQPKVLTPCRKDVLVTPWLAPIVWEGTFNIDILNEQFRLQNTTIGLTVFAIKKYVAFLKLFLETAEKHFMVGHRVHYYVFTDQPAAVPRVTLGTGRQLSVLEVRAYKRWQDVSMRRMEMISDFCERRFLSEVDYLVCVDVDMEFRDHVGVEILTPLFGTLHPGFYGSSREAFTYERRPQSQAYIPKDEGDFYYLGGFFGGSVQEVQRLTRACHQAMMVDQANGIEAVWHDESHLNKYLLRHKPTKVLSPEYLWDQQLLGWPAVLRKLRFTAVPKNHQAVRRERLPGALGGLPAAPSPSRPWF

SEQ ID NO: 3782 - protein, 521 aa, Homo sapiens
KKMLCSKDSLGLKEELTDEDREKVAVHEGINSGTAMSRGLYQPATIFMGRQMSAILSMRDFSTEHKSPQPTKNFSIPDPHSHRQTAQSSNVTDSCVVQTSNDTQCLNKSDNIDGKASLQIGEKMPVTASVLSEEEQTHCLEIGSNTRHGKSNLSEGKKSAELNSPLRERLSPENRTTDLKCDSSSGSEGEILTREHIEVEEKRASPPVSPIPVSEYCESENKWSQEKHSPWEGVSDHLAHREPKSQKPFRKMQEEEEESWSTSSDLTISISEDDLILESPEPQPNPGGKMEGEDGIEALKLIHAEQERVALSTEKNCILQTLSSPDSEKESSTNAPTREPGQTPDSDVPRAQVGQHVATLKEHDNSVKEEATALLRKALTEECGRRSAIHSSESSCSLPSILNDNSGIKEAKPAVWLNSVPTREQETEAYQLLKKATLQDNTNQTENRFQKTDASVSHLSGLNIGSGAFETKTANKIASEASFSSSEGSPLSRHENKKKPVINLKSNGERDNRTLDFLFLF

SEQ ID NO: 3783 - protein, 755 aa, Homo sapiens
MEPIDLSIPKNFRKGDKDLATPSEAKKPEEEAGSSEQPSPCPAPGPSLPVTLGPSGILESPMAPAPAATPEPPAQPLQGPVQLAVPIYSSALVSSPPLVGSSALLSGTALLRPLRPKPPLLLPKPPVTEELPPLASIAQIISSVSSAPTLLKTKVADPGPASTGSNTTASDSLGGSVPKAATTATPAATTSPKESSEPPAPASSPEAASPTEQGPAGTSKKRGRKRGMRSRPRANSGGVDLDSSGEFASIEKMLATTDTNKFSPFLQTAEDNTQDEVAGAPADHHGPSDEEQGSPPEDKLLRAKRNSYTNCLQKITCPHCPRVFPWASSLQRHMLTHTDSQSDAETAAAAGEVLDLTSRDREQPSEGATELRQVAGDAPVEQATAETASPVHREEHGRGESHEPEEEHGTEESTGDADGGRGRVEQPEPGPGLRHQAHGLQAGGGRRRGRAGGAASQEQKLACDTCGKSFKFLGTLSRHRKAHGRQEPKDEKGDGASTAEEGPQPAPEQEEKPPETPAEVVESAPGAGEAPAEKLAEETEGPSDGESAAEKRSSEKSDDDKKPKTDSPKSVASKADKRKKVCSVCNKRFWSLQDLTRHMRSHTGERPYKCQTCERTFTLKHSLVRHQRIHQKARHAKHHGKDSDKEERGEEDSENESTHSGNNAVSENEAELAPNASNHMAVTRSRKEGLASATKDCSHREEKVTAGWPSEPGQGDLNPESPAALGQDLLEPRSKRPAHPILATADGASQLVGME

SEQ ID NO: 3784 - protein, 335 aa, Homo sapiens
MSVKWTSVILLIQLSFCFSSGNCGKVLVWAAEYSHWMNIKTILDELIQRGHEVTVLASSASILFDPNNSSALKIEIYPTSLTKTELENFIMQQIKRWSDLPKDTFWLYFSQVQEIMSIFGDITRKFCKDVVSNKKFMKKVQESRFDVIFADAIFPCSELLAELFNIPFVYSLSFSPGYTFEKHSGGFIFPPSYVPVVMSELTDQMTFMERVKNMIYVLYFDFWFEIFDMKKWDQFYSEVLGRPTTLSETMGKADVWLIRNSWNFQFPYPLLPNVDFVGGLHCKPAKPLPKEMEDFVQSSGENGVVVFSLGSMVSNMTEERANVIASALAQIPQKI

SEQ ID NO: 3785 - protein, 152 aa, Homo sapiens [sequence omitted]

SEQ ID NO: 3786 - protein, 3354 aa, Homo sapiens
MGRHVATSCHVAWLLVLISGCWGQVNRLPFFTNHFFDTYLLISEDTPVGSSVTQLLAQDMDNDPLVFGVSGEEASRFFAVEPDTGVVWLRQPLDRETKSEFTVEFSVSDHQGVITRKVNIQVGDVNDNAPTFHNQPYSVRIPENTPVGTPIFIVNATDPDLGAGGSVLYSFQPPSQFFAIDSARGIVTVIRELDYETTQAYQLTVNATDQDKTRPLSTLANLAIIITDVQDMDPIFINLPYSTNIYEHSPPGTTVRIITAIDQDKGRPRGIGYTIVSGNTNSIFALDYISGVLTLNGLLDRENPLYSHGFILTVKGTELNDDRTPSDATVTTTFNILVIDINDNAPEFNSSEYSVAITELAQVGFALPLFIQVVDKDETQGLNSMFEVYLVGNNSHHFIISPTSVQGKADIRIRVAIPLDYETVDRYDFDLFANESVPDHVGYAKVKITLINENDNRPIFSQPLYNISLYENVTVGTSVLTVLATDNDAGTFGEVSYFFSDDPDRFSLDKDTGLIMLIARLDYELIQRFTLTIIARDGGGEETTGRVRINVLDVNDNVPTFQKDAYVGALRENEPSVTQLVRLRATDEDSPPNNQITYSIVSASAFGSYFDISLYEGYGVISVSRPLDYEQISNGLIYLTVMAMDAGNPPLNSTVPVTIEVFDENDNPPTFSKPAYFVSVVENIMAGATVLFLNATDLDRSREYGQESIIYSLEGSTQFRINARSGEITTTSLLDRETKSEYILIVRAVDGGVGHNQKTGIATVNITLLDINDNHPTWKDAPYYINLVEMTPPDSDVTTVVAVDPDLGENGTLVYSIQPPNKFYSLNSTTGKIRTTHAMLDRENPDPHEAELMRKIVVSVTDCGRPPLKATSSATVFVNLLDLNDNDPTFQNLPFVAEVLEGIPAGVSIYQVVAIDLDEGLNGLVSYRMPVGMPRMDFLINSSSGVVVTTTELDRERIAEYQLRVVASDAGTPTKSSTSTLTIHVLDVNDETPTFFPAVYNVSVSEDVPREFRVVWLNCTDNDVGLNAELSYFITGGNVDGKFSVGYRDAVVRTVVGLDRETTAAYMLILEAIDNGPVGKRHTGTATVFVTVLDVNDNRPIFLQSSYEASVPEDIPEGHSILQLKATDADEGEFGRVWYRILHGNHGNNFRIHVSNGLLMRGPRPLDRERNSSHVLIVEAYNHDLGPMRSSVRVIVYVEDINDEAPVFTQQQYSRLGLRETAGIGTSVIVVQATDRDSGDGGLVNYRILSGAEGKFEIDESTGLIITVNYLDYETKTSYMMNVSATDQAPPFNQGFCSVYITLLNELDEAVQFSNASYEAAILENLALGTEIVRVQAYSIDNLNQITYRFNAYTSTQAKALFKIDAITGVITVQGLVDREKGDFYTLTVVADDGGPKVDSTVQVYITVLDENDNSPRFDFTSDSAVSIPEDCPVGQRVATVKAWDPDAGSNGQVVFSLASGNIAGAFEIVTTNDSIGEVFVARPLDREELDHYILQVVASDRGTPPRKKDHILQVTILDINDNPPVIESPFGYNVSVNENVGGGTAVVQVRATDRDIGINSVLSYYITEGNKDMAFRMDRISGEIATRPAPPDRERQSFYHLVATVEDEGTPTLSATTHVYVTIVDENDNAPMFQQPHYEVLLDEGPDTLNTSLITIQALDLDEGPNGTVTYAIVAGNIVNTFRIDRHMGVITAAKELDYEISHGRYTLIVTATDQCPILSHRLTSTTTVLVNVNDINDNVPTFPRDYEGPFEVTEGQPGPRVWTFLAHDRDSGPNGQVEYSIMDGDPLGEFVISPVEGVLRVRKDVELDRETIAFYNLTICARDRGMPPLSSTMLVGIRVLDINDNDPVLLNLPMNITISENSPVSSFVAHVLASDADSGCNARLTFNITAGNRERAFFINATTGIVTVNRPLDRERIPEYKLTISVKDNPENPRIARRDYDLLLIFLSDENDNHPLFTKSTYQAEVMENSPAGTPLTVLNGPILALDADQDIYAVVTYQLLGAQSGLFDINSSTGVVTVRSGVIIDREAFSPPILELLLLAEDIGLLNSTAHLLITILDDNDNRPTFSPATLTVHLLENCPPGFSVLQVTATDEDSGLNGELVYRIEAGAQDRFLIHLVTGVIRVGNATIDREEQESYRLTVVATDRGTVPLSGTAIVTILIDDINDSRPEFLNPIQTVSVLESAEPGTVIANITAIDHDLNPKLEYHIVGIVAKDDTDRLVPNQEDAFAVNINTGSVMVKSPMNRELVATYEVTLSVIDNASDLPERSVSVPNAKLTVNVLDVNDNTPQFKPFGITYYMERILEGATPGTTLIAVAAVDPDKGLNGLVTYTLLDLVPPGYVQLEDSSAGKVIANRTVDYEEVHWLNFTVRASDNGSPPRAAEIPVYLEIVDINDNNPIFDQPSYQEAVFEDVPVGTIILTVTATDADSGNFALIEYSLGDGESKFAINPTTGDIYVLSSLDREKKDHYILTALAKDNPGDVASNRRENSVQVVIQVLDVNDCRPQFSKPQFSTSVYENEPAGTSVITMMATDQDEGPNGELTYSLEGPGVEAFHVDMDSGLVTTQRPLQSYEKFSLTVVATDGGEPPLWGTTMLLVEVIDVNDNRPVFVRPPNGTILHIREEIPLRSNVYEVYATDKDEGLNGAVRYSFLKTAGNRDWEFFIIDPISGLIQTAQRLDRESQAVYSLILVASDLGQPVPYETMQPLQVALEDIDDNEPLFVRPPKGSPQYQLLTVPEHSPRGTLVGNVTGAVDADEGPNAIVYYFIAAGNEEKNFHLQPDGCLLVLRDLDREREAIFSFIVKASSNRSWTPPRGPSPTLDLVADLTLQEVRVVLEDINDQPPRFTKAEYTAGVATDAKVGSELIQVLALDADIGNNSLVFYSILAIHYFRALANDSEDVGQVFTMGSMDGILRTFDLFMAYSPGYFVVDIVARDLAGHNDTAIIGIYILRDDQRVKIVINEIPDRVRGFEEEFIHLLSNITGAIVNTDNVQFHVDKKGRVNFAQTELLIHVVNRDTNRILDVDRVIQMIDENKEQLRNLFRNYNVLDVQPAISVRLPDDMSALQMAIIVLAILLFLAAMLFVLMNWYYRTVHKRKLKAIVAGSAGNRGFIDIMDMPNTNKYSFDGANPVWLDPFCRNLELAAQAEHEDDLPENLSEIADLWNSPTRTHGTFGREPAAVKPDDDRYLRAAIQEYDNIAKLGQIIREGPIKGSLLKVVLEDYLRLKKLFAQRMVQKASSCHSSISELIQTELDEEPGDHSPGQGSLRFRHKPPVELKGPDGIHVVHGSTGTLLATDLNSLPEEDQKGLGRSLETLTAAEATAFERNARTESAKSTPLHKLRDVIMETPLEITEL

SEQ ID NO: 3787 - protein, 1874 aa, Homo sapiens
MECLTRAEADIVLLVDGSWSIGRANFRTVRSFISRIVEVFDIGPKRVQIALAQYSGDPRTEWQLNAHRDKKSLLQAVANLPYKGGNTLTGMALNFIRQQNFRTQAGMRPRARKIGVLITDGKSQDDVEAPSKKLKDEGVELFAIGIKNADEVELKMIATDPDDTHAYNVADFESLSRIVDDLTINLCNSVKGPGDLEAPSNLVISERTHRSFRVSWTPPSDSVDRYKVEYYPVSGGKRQEFYVSRMETSTVLKDLKPETEYVVNVYSVVEDEYSEPLKGTEKTLPVPVVSLNIYDVGPTTMHVQWQPVGGATGYILSYKPVKDTEPTRPKEVRLGPTVNDMQLTDLVPNTEYAVTVQAVLHDLTSEPVTVREVTLPLPRPQDLKLRDVTHSTMNVFWEPVPGKVRKYIVRYKTPEEDVKEVEVDRSETSTSLKDLFSQTLYTVSVSAVHDEGESPPVTAQETTRPVPAPTNLKITEVTSEGFRGTWDHGASDVSLYRITWAPFGSSDKMETILNGDENTLVFENLNPNTIYEVSITAIYPDESESDDLIGSERTLPILTTQAPKSGPRNLQVYNATSNSLTVKWDPASGRVQKYRITYQPSTGEGNEQTTTIGGRQNSVVLQKLKPDTPYTITVSSLYPDGEGGRMTGRGKTKPLNTVRNLRVYDPSTSTLNVRWDHAEGNPRQYKLFYAPAAGGPEELVPIPGNTNYAILRNLQPDTSYTVTVVPVYTEGDGGRTSDTGRTLMRGLARNVQVYNPTPNSLDVRWDPAPGPVLQYRVVYSPVDGTRPSESIVVPGNTRMVHLERLIPDTLYSVNLVALYSDGEGNPSPAQGRTLPRSGPRNLRVFGETTNSLSVAWDHADGPVQQYRIIYSPTVGDPIDEYTTVPGRRNNVILQPLQPDTPYKITVIAVYEDGDGGHLTGNGRTVGLLPPQNIHISDEWYTRFRVSWDPSPSPVLGYKIVYKPVGSNEPMEAFVGEMTSYTLHNLNPSTTYDVNVYAQYDSGLSVPLTDQGTTLYLNVTDLKTYQIGWDTFCVKWSPHRAATSYRLKLSPADGTRGQEITVRGSETSHCFTGLSPDTDYGVTVFVQTPNLEGPGVSVKEHTTVKPTEAPTEPPTPPPPPTIPPARDVCKGAKADIVFLTDASWSIGDDNFNKVVKFIFNTVGGFDEISPAGIQVSFVQYSDEVKSEFKLNTYNDKALALGALQNIRYRGGNTRTGKALTFIKEKVLTWESGMRKNVPKVLVVVTDGRSQDEVKKAALVIQHSRFSVFVVGVADVDYNELANIASKPSERHVFIVDDFESFEKIEDNLITFVCETATSSCPLIYLDGYTSPGFKMLEAYNLTEKNFASVQGVSLESGSFPSYSAYRIQKNAFVNQPTADLHPNGLPPSYTIILLFRLLPETPSDPFAIWQITDRDYKPQVGVIADPSSKTLSFFNKDTRGEVQTVTFDTEEVKTLFYGSFHKVHIVVTSKSVKIYIDCYEIIEKDIKEAGNITTDGYEILGKLLKGERKSAAFQIQSFDIVCSPVWTSRDRCCDIPSRRDEGKCPAFPNSCTCTQDSVGPPGPPGPAGGPGAKGPRGERGISGAIGPPGPRGDIGPPGPQGPPGPQGPNGLSIPGEQGRQGMKGDAGEPGLPGRTGTPGLPGPPGPMGPPGDRGFTGKDGAMGPRGPPGPPGSPGSPGVTGPSGKPGKPGDHGRPGPSGLKGEKGDRGDIASQNMMRAVARQVCEQLISGQMNRFNQMLNQIPNDYQSSRNQPGPPGPPGPPGSAGARGEPGPGGRPGFPGTPGMQGPPGERGLPGEKGERGTGSSGPRGLPGPPGPQGESRTGPPGSTGSRGPPGPPGRPGNSGIRGPPGPPGYCDSSQCASIPYNGQGYPGSG

SEQ ID NO: 3788 - protein, 126 aa, Homo sapiens
MPEPAKSAPAPKKGSKKAVTKAQKKDGKKRKRSRKESYSVYVYKVLKQVHPDTGISSKAMGIMNSFVNDIFERIAGEASRLAHYNKRSTITSREIQTAVRLLLPGELAKHAVSEGTKAVTKYTSSK

SEQ ID NO: 3789 - protein, 353 aa, Homo sapiens
MAEVLRTLAGKPKCHALRPMILFLIMLVLVLFGYGVLSPRSLMPGSLERGFCMAVREPDHLQRVSLPRMVYPQPKVLTPCRKDVLVTPWLAPIVWEGTFNIDILNEQFRLQNTTIGLTVFAIKKYVAFLKLFLETAEKHFMVGHRVHYYVFTDQPAAVPRVTLGTGRQLSVLEVRAYKRWQDVSMRRMEMISDFCERRFLSEVDYLVCVDVDMEFRDHVGVEILTPLFGTLHPGFYGSSREAFTYERRPQSQAYIPKDEGDFYYLGGFFGGSVQEVQRLTRACHQAMMVDQANGIEAVWHDESHLNKYLLRHKPTKVLSPEYLWDQQLLGWPAVLRKLRFTAVPKNHQAVRNP

SEQ ID NO: 3790 - protein, 323 aa, Homo sapiens
MWATLPLLCAAELCVNSLEKFHFKSWMSKHRKTYSTEEYHHRLQTFASNWRKINAHNNGNHTFKMALNQFSDMSFAEIKHKYLWSEPQNCSATKSNYLRGTGPYPPSVDWRKKGNFVSPVKNQGACGSCWTFSTTGALESAIAIATGKMLSLAEQQLVDCAQDFNNHGCQGGLPSQAFEYILYNKGIMGEDTYPYQGKDGYCKFQPGKAIGFVKDVANITIYDEEAMVEAVALYNPVSFAFEVTQDFMMYRTGIYSSTSCHKTPDKVNHAVLAVGYGEKNGIPYWIVKNSWGPQWGMNGYFLIERGKNMCGLAACASYPIPLV

SEQ ID NO: 3791 - protein, 556 aa, Homo sapiens
MRMSPPSASPPSSSGGRTSSSTTTAGEPFWAGVLFAIRPHPGLSGRIVWTAGCPGEGADGDFAVTHLTKAHLFHDGRVQWTPPAIYKSSCSIDVTFFPFDQQNCTMKFGSWTYDKAKIDLVNMHSRVDQLDFWESGEWVIVDAVGTYNTRKYECCAEIYPDITYAFVIRRLPLFYTINLIIPCLLISCLTVLVFYLPSECGEKITLCISVLLSLTVFLLLITEIIPSTSLVIPLIGEYLLFTMIFVTLSIVITVFVLNVHHRSPRTHTMPTWVRRVFLDIVPRLLLMKRPSVVKDNCRRLIESMHKMASAPRFWPEPEGEPPATSGTQSLHPPSPSFCVPLDVPAEPGPSCKSPSDQLPPQQPLEAEKASPHPSPGPCRPPHGTQAPGLAKARSLSVQHMSSPGEAVEGGVRCRSRSIQYCVPRDDAAPEADGQAAGALASRNTHSAELPPPDQPSPCKCTCKKEPSSVSPSATVKTRSTKAPPPHLPLSPALTRAVEGVQYIADHLKAEDTDFSVKEDWKYVAMVIDRIFLWMFIIVCLLGTVGLFLPPWLAGMI

SEQ ID NO: 3792 - protein, 378 aa, Homo sapiens
MKLLHVFLLFLCFHLRFCKVTYTSQEDLVEKKCLAKKYTHLSCDKVFCQPWQRCIEGTCVCKLPYQCPKNGTAVCATNRRSFPTYCQQKSLECLHPGTKFLNNGTCTAEGKFSVSLKHGNTDSEGIVEVKLVDQDKTMFICKSSWSMREANVACLDLGFQQGADTQRRFKLSDLSINSTECLHVHCRGLETSLAECTFTKRRTMGYQDFADVVCYTQKADSPMDDFFQCVNGKYISQMKACDGINDCGDQSDELCCKACQGKGFHCKSGVCIPSQYQCNGEVDCITGEDEVGCAGFASVTQEETEILTADMDAERRRIKSLLPKLSCGVKNRMHIRRKRIVGGKRAQLGGKMKQISLDIFKGLHRVYAILEFCCIILK

SEQ ID NO: 3793 - protein, 670 aa, Homo sapiens [sequence omitted]

SEQ ID NO: 3794 - protein, 792 aa, Homo sapiens
MQQESERCRVRARRPDMALYVPKARRGAVLLKTGDEEESCGSPNSVVKEKQKESSLSQKEVFKDKPEARRLNINPDRKEHNCREEKKSSTKLRMDTCLQKTNRVCSKRGTTESKEVLSQGQQQGAPNAGVITNAPLQRHFKPKKVECLEVETTDVTGHERILLSQACLEISEAQVPSKPFQNVEFCDFSRHEPDGEAFEDKDLEGRIETDTKVLEILYEFPRVFSSVMKPENMIVPIKLSSDSEIVQQSMQTSDGILNPSSGGITTTSVPGSPDGVFDQTCVDFEVESVGGIANSTGFILDQKDTDSIPATMGHISLSESTNDTVSPVMIRECEKNDSTADELHVKHEPPDTAVLAHETHRDSGFKNVGDITNKACMMDTTGMSCSDHVTVDSPYVVAVRIADETSINTRSFSKFVGMSADATPLHVARSGNDTEDFSNPSACSDIYGESISSHFTESTGKLIESLSDCASSLPIKKIAGSNYNTFLDSELSMLNGTKVLSDSAVGIDLGSTGDTTEALHELRTAEEFKTEEQDDSGSIEFGVSFPDRESSSMETSIEPKATETSHTEGITAIEESWESMFNDDGDCLDPRLLQEGILMHIKPENHCSKLSGNTKSRESIQEPRSDYYNHEVPDIDLSDCEFPHVIEIYDFPQEFHTEDLLRVFCSYQKKGFDIKWVDDTHALGVFSSPITARDALGIKHTMVKIRPLSQATRAAKAKARAYAEFLQPAKERPETSAALARRLVISALGVRSKQSKTEREAELKKLQEARERKRLEAKQREDIWEGRDQSTV

SEQ ID NO: 3795 - protein, 220 aa, Homo sapiens
MWVPVVFLTLSVTWIGAAPLILSRIVGGWECEKHSQPWQVLVASRGRAVCGGVLVHPQWVLTAAHCIRNKSVILLGRHSLFHPEDTGQVFQVSHSFPHPLYDMSLLKNRFLRPGDDSSIEPEEFLTPKKLQCVDLHVISNDVCAQVHPQKVTKFMLCAGRWTGGKSTCSGDSGGPLVCNGVLQGITSWGSEPCALPERPSLYTKVVHYRKWIKDTIVANP

SEQ ID NO: 3796 - protein, 208 aa, Homo sapiens
ESAAQKTSEGLERAAENNVFHLVATVCSQEEPVQPLLREVLRPSRDSQQRVRRNLRASAREVRQEGRYRVLSSRRSLGTTSSGQESEYTPGNPEAAGNSGFQLLDLVHEEGEPEAASAGSCKTSDPDVILCNSVELIRERLTVSEDGPGVRRQEEQKHDDYVYDIYYLETATPGWIENILSVQPYSQEWELVRGPMSRRGMRHPKLLI

SEQ ID NO: 3797 - protein, 213 aa, Homo sapiens
MTPGTQSPFFLLLLLTVLTGSGHASSTPGGEKETSATQRSSVPSSTEKNAVSMTSSVLSSHSPGSGSSTTQGQDVTLAPATEPASGSAATWGQDVTSVPVTRPALGSTTPPAGVPGWGIALLVLVCVLVALAIVYLIALAVCQCRRKNYGQLDIFPARDTYHPMSEYPTYHTHGRYVPPSSTDRSPYEKVSAGNGGSSLSYTNPAVAATSANL

SEQ ID NO: 3798 - protein, 668 aa, Homo sapiens
MAVYRAALGASLAAARLLPLGRCSPSPAPRSTLSGAAMEPAPRWLAGLRFDNRALRALPVEAPPPGPEGAPSAPRPVPGACFTRVQPTPLRQPRLVALSEPALALLGLGAPPAREAEAEAALFFSGNALLPGAEPAAHCYCGHQFGQFAGQLGDGAAMYLGEVCTATGERWELQLKGAGPTPFSRQADGRKVLRSSIREFLCSEAMFHLGVPTTRAGACVTSESTVVRDVFYDGNPKYEQCTVVLRVASTFIRFGSFEIFKSADEHTGRAGPSVGRNDIRVQLLDYVISSFYPEIQAAHASDSVQRNAAFFREVTRRTARMVAEWQCVGFCHGVLNTDNMSILGLTIDYGPFGFLDRYDPDHVCNASDNTGRYAYSKQPEVCRWNLRKLAEALQPELPLELGEAILAEEFDAEFQRHYLQKMRRKLGLVQVELEEDGALVSKLLETMHLTGADFTNTFYLLSSFPVELESPGLAEFLARLMEQCASLEELRLAFRPQMDPRQLSMMLMLAQSNPQLFALMGTRAGIARELERVEQQSRLEQLSAAELQSRNQGHWADWLQAYRARLDKDLEGAGDAAAWQAEHVRVMHANNPKYVLRNYIAQNAIEAAERGDFSEVRRVLKLLETPYHCEAGAATDAEATEADGADGRQRSYSSKPPLWAAELCVTSS

SEQ ID NO: 3799 - protein, 584 aa, Homo sapiens
MGPADSWGHHWMGILLSASLCTVWSPPAAAQLTLNANPLDATQSEDVVLPVFGTPRTPQIHGRSRELAKPSIAVSPGTAIEQKDMVTFYCTTKDVNITIHWVSNNLSIVFHERMQLSKDGKILTILIVQREDSGTYQCEARDALLSQRSDPIFLDVKYGPDPVEIKLESGVASGEVVEVMEGSSMTFLAETKSHPPCAYTWFLLDSILSHTTRTFTIHAVSREHEGLYRCLVSNSATHLSSLGTLKVRVLETLTMPQVVPSSLNLVENARSVDLTCQTVNQSVNVQWFLSGQPLLPSEHLQLSADNRTLIIHGLQRNDTGPYACEVWNWGSRARSEPLELTINYGPDQVHITRESASEMISTIEAELNSSLTLQCWAESKPGAEYRWTLEHSTGEHLGEQLIIRALTWEHDGIYNCTASNSLTGLARSTSVLVKVVGPQSSSLSSGAIAGIVIGILAVIAVASELGYFLCIRNARRPSRKTTEDPSHETSQPIPKEEHPTEPSSESLSPEYRNISQLQGRIRVELMQPPDLPEETYETKLPSASRRGNSFSPWKPPPKPLMPPLRLVSTVPKNMESIYEVFMPH

SEQ ID NO: 3800 - protein, 623 aa, Homo sapiens
VGRSPSATPAERPPRGCAELAQRQQHEPDPRIGRAPVESRLLREAGPTPARAAGQLEYETQIKKMLCSKDSLGLKEELTDEDREKVAVHEGINSGTAMSRGLYQPATIFMGRQMSAILSMRDFSTEHKSPQPTKNFSIPDPHSHRQTAQSSNVTDSCVVQTSNDTQCLNKSDNIDGKASLQIGEKMPVTASVLSEEEQTHCLEIGSNTRHGKSNLSEGKKSAELNSPLRERLSPENRTTDLKCDSSSGSEGEILTREHIEVEEKRASPPVSPIPVSEYCESENKWSQEKHSPWEGVSDHLAHREPKSQKPFRKMQEEEEESWSTSSDLTISISEDDLILESPEPQPNPGGKMEGEDGIEALKLIHAEQERVALSTEKNCILQTLSSPDSEKESSTNAPTREPGQTPDSDVPRAQVGQHVATLKEHDNSVKEEATALLRKALTEECGRRSAIHSSESSCSLPSILNDNSGIKEAKPAVWLNSVPTREQEVSSGCGDKSKKENVAADIPITETEAYQLLKKATLQDNTNQTENRFQKTDASVSHLSGLNIGSGAFETKTANKIASEASFSSSEGSPLSRHENKKKPVINLKSNALWDESDDSNSEIEAALRPRNHNTDDSDDFYD

SEQ ID NO: 3801 - protein, 1675 aa, Homo sapiens
MFRQFYLWTCLASGIILGSLFEICLGQYDDDCKLARGGPPATIVAIDEESRNGTILVDNMLIKGTAGGPDPTIELSLKDNVDYWVLMDPVKQMLFLNSTGRVLDRDPPMNIHSIVVQVQCINKKVGTIIYHEVRIVVRDRNDNSPTFKHESYYATVNELTPVGTTIFTGFSGDNGATDIDDGPNGQIEYVIQYNPDDPTSNDTFEIPLMLTGNIVLRKRLNYEDKTRYFVIIQANDRAQNLNERRTTTTTLTVDVLDGDDLGPMFLPCVLVPNTRDCRPLTYQAAIPELRTPEELNPIIVTPPIQAIDQDRNIQPPSDRPGILYSILVGTPEDYPRFFHMHPRTAELSLLEPVNRDFHQKFDLVIKAEQDNGHPLPAFAGLHIEILDENNQSPYFTMPSYQGYILESAPVGATISDSLNLTSPLRIVALDKDIEDTKDPELHLFLNDYTSVFTVTQTGITRYLTLLQPVDREEQQTYTFSITAFDGVQESEPVIVNIQVMDANDNTPTFPEISYDVYVYTDMRPGDSVIQLTAVDADEGSNGEITYEILVGAQGDFIINKTTGLITIAPGVEMIVGRTYALTVQAADNAPPAERRNSICTVYIEVLPPNNQSPPRFPQLMYSLEISEAMRVGAVLLNLQATDREGDSITYAIENGDPQRVFNLSETTGILTLGKALDRESTDRYILIITASDGRPDGTSTATVNIVVTDVNDNAPVFDPYLPRNLSVVEEEANAFVGQVKATDPDAGINGQVHYSLGNFNNLFRITSNGSIYTAVKLNREVRDYYELVVVATDGAVHPRHSTLTLAIKVLDIDDNSPVFTNSTYTVLVEENLPAGTTILQIEAKDVDLGANVSYRIRSPEVKHFFALHPFTGELSLLRSLDYEAFPDQEASITFLVEAFDIYGTMPPGIATVTVIVKDMNDYPPVFSKRIYKGMVAPDAVKGTPITTVYAEDADPPGLPASRVRYRVDDVQFPYPASIFEVEEDSGRVITRVNLNEEPTTIFKLVVVAFDDGEPVMSSSATVKILVLHPGEIPRFTQEEYRPPPVSELATKGTMVGVISAAAINQSIVYSIVSGNEEDTFGINNITGVIYVNGPLDYETRTSYVLRVQADSLEVVLANLRVPSKSNTAKVYIEIQDENNHPPVFQKKFYIGGVSEDARMFTSVLRVKATDKDTGNYSVMAYRLIIPPIKEGKEGFVVETYTGLIKTAMLFHNMRRSYFKFQVIATDDYGKGLSGKADVLVSVVNQLDMQVIVSNVPPTLVEKKIEDLTEILDRYVQEQIPGAKVVVESIGARRHGDAFSLEDYTKCDLTVYAIDPQTNRAIDRNELFKFLDGKLLDINKDFQPYYGEGGRILEIRTPEAVTSIKKRGESLGYTEGALLALAFIIILCCIPAILVVLVSYRQFKVRQAECTKTARIQAALPAAKPAVPAPAPVAAPPPPPPPPPGAHLYEELGDSSMYEMPQYGSRRRLLPPAGQEEYGEVVGEAEEEYEEEEWARKRMIKLVVDREYETSSTGEDSAPECQRNRLHHPSIHSNINGNIYIAQNGSVVRTRRACLTDNLKVASPVRLGGPFKKLDKLAVTHEENVPLNTLSKGPFSTEKMNARPTLVTFAPCPVGTDNTAVKPLRNRLKSTVEQESMIDSKNIKEALEFHSDHTQSDDEELWMGPWNNLHIPMTKL

SEQ ID NO: 3802 - protein, 181 aa, Homo sapiens
MTRTRAALLLFTALATSLGFNLDTEELTAFRVDSAGFGDSVVQYANSWVVVGAPQKITAANQTGGLYQCGYSTGACEPIGLQVPPEAVNMSLGLSLASTTSPSQLLLTQRLPVSRQGECRDHQGFEELTHIQLGVRWARDSLARVDQKEGIWKKSYHVLQWFLTLLPAHPADRPHAAGPFL

SEQ ID NO: 3803 - protein, 584 aa, Homo sapiens
MGPADSWGHHWMGILLSASLCTVWSPPAAAQLTLNANPLDATQSEDVVLPVFGTPRTPQIHGRSRELAKPSIAVSPGTAIEQKDMVTFYCTTKDVNITIHWVSNNLSIVFHERMQLSKDGKILTILIVQREDSGTYQCEARDALLSQRSDPIFLDVKYGPDPVEIKLESGVASGEVVEVMEGSSMTFLAETKSHPPCAYTWFLLDSILSHTTRTFTIHAVSREHEGLYRCLVSNSATHLSSLGTLKVRVLETLTMPQVVPSSLNLVENARSVDLTCQTVNQSVNVQWFLSGQPLLPSEHLQLSADNRTLIIHGLQRNDTGPYACEVWNWGSRARSEPLELTINYGPDQVHITRESASEMISTIEAELNSSLTLQCWAESKPGAEYRWTLEHSTGEHLGEQLIIRALTWEHDGIYNCTASNSLTGLARSTSVLVKVVGPQSSSLSSGAIAGIVIGILAVIAVASELGYFLCIRNARRPSRKTTEDPSHETSQPIPKEEHPTEPSSESLSPEYRNISQLQGRIRVELTKLPSASRRGNSFSPWKPPPKPLMPPLRLVSTVPKNMESIYEELVNPEPNTYIQINPSV

SEQ ID NO: 3804 - protein, 142 aa, Homo sapiens [sequence omitted]

SEQ ID NO: 3805 - protein, 396 aa, Homo sapiens
MAPVPLGPLGETYCEEHGEKIYFFCENDAEFLCVFCREGPTHQAHTVGFLDEAIQPYRDRLRSRLEALSTERDEIEDVKCQEDQKLQVLLTQIESKKHQVETAFERLQQELEQQRCLLLARLRELEQQIWKERDEYITKVSEEVTRLGAQVKELEEKCQQPASELLQDVRGTIVTCEMKTFVSPEAISPDLVKKIRDFHRKILTLPEMMRMFSENLAHHLEIDSGVITLDPQTASRSLVLSEDRKSVRYTRQKKSLPDSPLRFDGLPAVLGFPGFSSGRHRWQVDLQLGDGGGCTVGVAGEGVRRKGEMGLSAEDGVWAVIISHQQCWASTSPGTDLPLSEIPRGVRVALDYEAGQVTLHNAQTQEPIFTFTASFSGKVFPFFAVWKKGSCLTLKG

SEQ ID NO: 3806 - protein, 174 aa, Homo sapiens
AVHPVKNWMDMKRRVGPYRRCYFFSHCSTPGEPLVVLHVALTGDISSNIQAIVKEHPPSETEEKNKITAAIFYSISLTQQGLQGVELGTFLIKRVVKELQFTHSKPLGSHRPGTVGWGSGDREAAAGEICSADKRFLLLSPHQSCFLPGTSPSPSPSPCWQMLRYPGLWLPGCA

SEQ ID NO: 3807 - protein, 515 aa, Homo sapiens
MGLEALVPLAMIVAIFLLLVDLMHRHQRWAARYPPGPLPLPGLGNLLHVDFQNTPYCFDQLRRRFGDVFSLQLAWTPVVVLNGLAAVREAMVTRGEDTADRPPAPIYQVLGFGPRSQGVILSRYGPAWREQRRFSVSTLRNLGLGKKSLEQWVTEEAACLCAAFADQAGRPFRPNGLLDKAVSNVIASLTCGRRFEYDDPRFLRLLDLAQEGLKEESGFLREVLNAVPVLPHIPALAGKVLRFQKAFLTQLDELLTEHRMTWDPAQPPRDLTEAFLAKKEKAKGSPESSFNDENLRIVVGNLFLAGMVTTSTTLAWGLLLMILHLDVQRGRRVSPGCPIVGTHVCPVRVQQEIDDVIGQVRRPEMGDQAHMPCTTAVIHEVQHFGDIVPLGVTHMTSRDIEVQGFRIPKGTTLITNLSSVLKDEAVWKKPFRFHPEHFLDAQGHFVKPEAFLPFSAGRRACLGEPLARMELFLFFTSLLQHFSFSVAAGQPRPSHSRVVSFLVTPSPYELCAVPR

SEQ ID NO: 3808 - protein, 153 aa, Homo sapiens
MAAGTAVGAWVLVLSLWGAVVGAQNITARIGEPLVLKCKGAPKKPPQRLEWKLNTGRTEAWKVLSPQGGGPWDSVARVLPNGSLFLPAVGIQDEGILGGLGTAALLIGVILWQRRQRRGEERKAPENQEEEEERAELNQSEEPEAGESSTGGP

SEQ ID NO: 3809 - protein, 117 aa, Homo sapiens
MSRRKQSNPRQIKRSLGDMEAREEVQLVGASHMEQKATAPEAPSPPSADELEPVVQDGQRRIRARLSLATGLSWGPFHGSVQTRASSPRQAEPMRKLRLQDVKSIAQIPRIKQQREK

SEQ ID NO: 3810 - protein, 531 aa, Homo sapiens
MAEQVLPQALYLSNMRKAVKIRERTPEDIFKPTNGIIHHFKTMHRYTLEMFRTCQFCPQFREIIHKALIDRNIQATLESQKKLNWCREVRKLVALKTNGDGNCLMHATSQYMWGVQDTDLVLRKALFSTLKETDTRNFKFRWQLESLKSQEFVETGLCYDTRNWNDEWDNLIKMASTDTPMARSGLQYNSLEEIHIFVLCNILRRPIIVISDKMLRSLESGSNFAPLKVGGIYLPLHWPAQECYRYPIVLGYDSHHFVPLVTLKDSGPEIRAVPLVNRDRGRFEDLKVHFLTDPENEMKEKLLKEYLMVIEIPVQGWDHGTTHLINAAKLDEANLPKEINLVDDYFELVQHEYKKWQENSEQGRREGHAQNPMEPSVPQLSLMDVKCETPNCPFFMSVNTQPLCHECSERRQKNQNKLPKLNSKPGPEGLPGMALGASRGEAYEPLAWNPEESTGGPHSAPPTAPSPFLFSETTAMKCRSPGCPFTLNVQHNGFCERCHNARQLRQPRPRPHKALGSREVPSLPPGCYQDI

SEQ ID NO: 3811 - protein, 8560 aa, Homo sapiens
MADDEDYEEVVEYYTEEVVYEEVPGETITKIYETTTTRTSDYEQSETSKPALAQPALAQPASAKPVERRKVIRKKVDPSKFMTPYIAHSQKMQDLFSPNKYKEKFEKTKGQPYASTTDTPELRRIKKVQDQLSEVKYRMDGDVAKTICHVDEKAKDIEHAKKVSQQVSKVLYKQNWEDTKDKYLLPPDAPELVQAVKNTAMFSKKLYTEDWEADKSLFYPYNDSPELRRVAQAQKALSDVAYKKGLAEQQAQFTPLADPPDIEFAKKVTNQVSKQKYKEDYENKIKGKWSETPCFEVANARMNADNISTRKYQEDFENMKDQIYFMQTETPEYKMNKKAGVAASKVKYKEDYEKNKGKADYNVLPASENPQLRQLKAAGDALSDKLYKENYEKTKAKSINYCETPKFKLDTVLQNFSSDKKYKDSYLKDILGHYVGSFEDPYHSHCMKVTAQNSDKNYKAEYEEDRGKGFFPQTITQEYEAIKKLDQCKDHTYKVHPDKTKFTQVTDSPVLLQAQVNSKQLSDLNYKAKHESEKFKCHIPPDTPAFIQHKVNAYNLSDNLYKQDWEKSKAKKFDIKVDAIPLLAAKANTKNTSDVMYKKDYEKNKGKMIGVLSINDDPKMLHSLKVAKNQSDRLYKENYEKTKAKSMNYCETPKYQLDTQLKNFSEARYKDLYVKDVLGHYVGSMEDPYHTHCMKVAAQNSDKSYKAEYEEDKGKCYFPQTITQEYEAIKKLDQCKDHTYKVHPDKTKFTAVTDSPVLLQAQLNTKQLSDLNYKAKHEGEKFKCHIPADAPQFIQHRVNAYNLSDNVYKQDWEKSKAKKFDIKVDAIPLLAAKANTKNTSDVMYKKDYEKSKGKMIGALSINDDPKMLHSLKTAKNQSDREYRKDYEKSKTIYTAPLDMLQVTQAKKSQAIASDVDYKHILHSYSYPPDSINVDLAKKAYALQSDVEYKADYNSWMKGCGWVPFGSLEMEKAKRASDILNEKKYRQHPDTLKFTSIEDAPITVQSKINQAQRSDIAYKAKGEEIIHKYNLPPDLPQFIQAKVNAYNISENMYKADLKDLSKKGYDLRTDAIPIRAAKAARQAASDVQYKKDYEKAKGKMVGFQSLQDDPKLVHYMNVAKIQSDREYKKDYEKTKSKYNTPHDMFNVVAAKKAQDVVSNVNYKHSLHHYTYLPDAMDLELSKNMMQIQSDNVYKEDYNNWMKGIGWIPIGSLDVEKVKKAGDALNEKKYRQHPDTLKFTSIVDSPVMVQAKQNTKQVSDILYKAKGEDVKHKYTMSPDLPQFLQAKCNAYNISDVCYKRDWYDLIAKGNNVLGDAIPITAAKASRNIASDYKYKEAYEKSKGKHVGFRSLQDDPKLVHYMNVAKLQSDREYKKNYENTKTSYHTPGDMVSITAAKMAQDVATNVNYKQPLHHYTYLPDAMSLEHTRNVNQIQSDNVYKDEYNSFLKGIGWIPIGSLEVEKVKKAGDALNERKYRQHPDTVKFTSVPDSMGMVLAQHNTKQLSDLNYKVEGEKLKHKYTIDPELPQFIQAKVNALNMSDAHYKADWKKTIAKGYDLRPDAIPIVAAKSSRNIASDCKYKEAYEKAKGKQVGFLSLQDDPKLVHYMNVAKIQSDREYKKGYEASKTKYHTPLDMVSVTAAKKSQEVATNANYRQSYHHYTLLPDALNVEHSRNAMQIQSDNLYKSDFTNWMKGIGWVPIESLEVEKAKKAGEILSEKKYRQHPEKLKFTYAMDTMEQALNKSNKLNMDKRLYTEKWNKDKTTIHVMPDTPDILLSRVNQITMSDKLYKAGWEEEKKKGYDLRPDAIAIKAARASRDIASDYKYKKAYEQAKGKHIGFRSLEDDPKLVHFMQVAKMQSDREYKKGYEKSKTSFHTPVDMLSVVAAKKSQEVATNANYRNVIHTYNMLPDAMSFELAKNMMQIQSDNQYKADYADFMKGIGWLPLGSLEAEKNKKAMEIISEKKYRQHPDTLKYSTLMDSMNMVLAQNNAKIMNEHLYKQAWEADKTKVHIMPDIPQIILAKANAINMSDKLYKLSLEESKKKGYDLRPDAIPIKAAKASRDIASDYKYKYNYEKGKGKMVGFRSLEDDPKLVHSMQVAKMQSDREYKKNYENTKTSYHTPADMLSVTAAKDAQANITNTNYKHLIHKYILLPDAMNIELTRNMNRIQSDNEYKQDYNEWYKGLGWSPAGSLEVEKAKKATEYASDQKYRQHPSNFQFKKLTDSMDMVLAKQNAHTMNKHLYTIDWNKDKTKIHVMPDTPDILQAKQNQTLYSQKLYKLGWEEALKKGYDLPVDAISVQLAKASRDIASDYKYKQGYRKQLGHHVGFRSLQDDPKLVLSMNVAKMQSEREYKKDFEKWKTKFSSPVDMLGVVLAKKCQELVSDVDYKNYLHQWTCLPDQNDVVQAKKVYELQSENLYKSDLEWLRGIGWSPLGSLEAEKNKRASEIISEKKYRQPPDRNKFTSIPDAMDIVLAKTNAKNRSDRLYREAWDKDKTQIHIMPDTPDIVLAKANLINTSDKLYRMGYEELKRKGYDLPVDAIPIKAAKASREIASEYKYKEGFRKQLGHHIGARNIEDDPKMMWSMHVAKIQSDREYKKDFEKWKTKFSSPVDMLGVVLAKKCQTLVSDVDYKNYLHQWTCLPDQSDVIHARQAYDLQSDNLYKSDLQWLKGIGWMTSGSLEDEKNKRATQILSDHVYRQHPDQFKFSSLMDSIPMVLAKNNAITMNHRLYTEAWDKDKTTVHIMPDTPEVLLAKQNKVNYSEKLYKLGLEEAKRKGYDMRVDAIPIKAAKASRDIASEFKYKEGYRKQLGHHIGARAIRDDPKMMWSMHVAKIQSDREYKKDFEKWKTKFSSPVDMLGVVLAKKCQTLVSDVDYKNYLHQWTCLPDQSDVIHARQAYDLQSDNMYKSDLQWMRGIGWVSIGSLDVEKCKRATEILSDKIYRQPPDRFKFTSVTDSLEQVLAKNNAITMNKRLYTEAWDKDKTQIHIMPDTPEIMLARMNKINYSESLYKLANEEAKKKGYDLRSDAIPIVAAKASRDIISDYKYKDGYCKQLGHHIGARNIEDDPKMMWSMHVAKIQSDREYKKDFEKWKTKFSSPVDMLGVVLAKKCQTLVSDVDYKNYLHEWTCLPDQSDVIHARQAYDLQSDNIYKSDLQWLRGIGWVPIGSMDVVKCKRATEILSDNIYRQPPDKLKFTSVTDSLEQVLAKNNALNMNKRLYTEAWDKDKTQIHIMPDTPEIMLARQNKINYSETLYKLANEEAKKKGYDLRSDAIPIVAAKASRDVISDYKYKDGYRKQLGHHIGARNIEDDPKMMWSMHVAKIQSDREYKKDFEKWKTKFSSPVDMLGVVLAKKCQTLVSDVDYKNYLHEWTCLPDQNDVIHARQAYDLQSDNIYKSDLQWLRGIGWVPIGSMDVVKCKRAAEILSDNIYRQPPDKLKFTSVTDSLEQVLAKNNALNMNKRLYTEAWDKDKTQVHIMPDTPEIMLARQNKINYSESLYRQAMEEAKKEGYDLRSDAIPIVAAKASRDIASDYKYKEAYRKQLGHHIGARAVHDDPKIMWSLHIAKVQSDREYKKDFEKYKTRYSSPVDMLGIVLAKKCQTLVSDVDYKHPLHEWICLPDQNDIIHARKAYDLQSDNLYKSDLEWMKGIGWVPIDSLEVVRAKRAGELLSDTIYRQRPETLKFTSITDTPEQVLAKNNALNMNKRLYTEAWDNDKKTIHVMPDTPEIMLAKLNRINYSDKLYKLALEESKKEGYDLRLDAIPIQAAKASRDIASDYKYKEGYRKQLGHHIGARNIKDDPKMMWSIHVAKIQSDREYKKEFEKWKTKFSSPVDMLGVVLAKKCQILVSDIDYKHPLHEWTCLPDQNDVIQARKAYDLQSDAIYKSDLEWLRGIGWVPIGSVEVEKVKRAGEILSDRKYRQPADQLKFTCITDTPEIVLAKNNALTMSKHLYTEAWDADKTSIHVMPDTPDILLAKSNSANISQKLYTKGWDESKMKDYDLRADAISIKSAKASRDIASDYKYKEAYEKQKGHHIGAQSIEDDPKIMCAIHAGKIQSEREYKKEFQKWKTKFSSPVDMLSILLAKKCQTLVTDIDYRNYLHEWTCMPDQNDIIQAKKAYDLQSDSVYKADLEWLRGIGWMPEGSVEMNRVKVAQDLVNERLYRTRPEALSFTSIVDTPEVVLAKANSLQISEKLYQEAWNKDKSNITIPSDTPEMLQAHINALQISNKLYQKDWNDAKQKGYDIRADAIEIKHAKASREIASEYKYKEGYRKQLGHHMGFRTLQDDPKSVWAIHAAKIQSDREYKKAYEKSKGIHNTPLDMMSIVQAKKCQVLVSDIDYRNYLHQWTCLPDQNDVIQAKKAYDLQSDNLYKSDLEWLKGIGWLPEGSVEVMRVKNAQNLLNERLYRIKPEALKFTSIVDTPEVIQAKINAVQISEPLYRDAWEKEKANVNVPADTPLMLQSKINALQISNKRYQQAWEDVKMTGYDLRADAIGIQHAKASRDIASDYLYKTAYEKQKGHYIGCRSAKEDPKLVWAANVLKMQNDRLYKKAYNDHKAKISIPVDMVSISAAKEGQALASDVDYRHYLHHWSCFPDQNDVIQARKAYDLQSDSVYKADLEWLRGIGWMPEGSVEMNRVKVAQDLVNERLYRTRPEALSFTSIVDTPEVVLAKANSLQISEKLYQEAWNKDKSNITIPSDTPEMLQAHINALQISNKLYQKDWNDTKQKGYDIRADAIEIKHAKASREIASEYKYKEGYRKQLGHHMGFRTLQDDPKSVWAIHAAKIQSDREYKKAYEKSKGIHNTPLDMMSIVQAKKCQVLVSDIDYRNYLHQWTCLPDQNDVIQAKKAYDLQSDNLYKSDLEWLKGIGWLPEGSVEVMRVKNAQNLLNERLYRIKPEALKFTSIVDTPEVIQAKINAVQISEPLYRNAWEKEKANVNVPADTPLMLQSKINALQISNKRYQQAWEDVKMTGYDLRADAIGIQHAKASRDIASDYLYKTAYEKQKGHYIGCRSAKEDPKLVWAANVLKMQNDRLYKKAYNDHKAKISIPVDMVSISAAKEGQALASDVDYRHYLHHWSCFPDQNDVIQARKAYDLQSDSVYKADLEWLRGIGWMPEGSVEMNRVKVAQDLVNERLYRTRPEALSFTSIVDTPEVVLAKANSLQISEKLYQEAWNKDKSNITIPSDTPEMLQAHINALQISNKLYQKDWNDTKQKGYDIRADAIEIKHAKASREIASEYKYKEGYRKQLGHHMGFRTLQDDPKSVWAIHAAKIQSDREYKKAYEKSKGIHNTPLDMMSIVQAKKCQVLVSDIDYRNYLHQWTCLPDQNDVIQAKKAYDLQSDNLYKSDLEWLKGIGWLPEGSVEVMRVKNAQNLLNERLYRIKPEALKFTSIVDTPEVIQAKINAVQISEPLYRDAWEKEKANVNVPADTPLMLQSKINALQISNKRYQQAWEDVKMTGYDLRADAIGIQHAKASRDIASDYLYKTAYEKQKGHYIGCRSAKEDPKLVWAANVLKMQNDRLYKKAYNDHKAKISIPVDMVSISAAKEGQALASDVDYRHYLHRWSCFPDQNDVIQARKAYDLQSDALYKADLEWLRGIGWMPQGSPEVLRVKNAQNIFCDSVYRTPVVNLKYTSIVDTPEVVLAKSNAENISIPKYREVWDKDKTSIHIMPDTPEINLARANALNVSNKLYREGWDEMKAGCDVRLDAIPIQAAKASREIASDYKYKLDHEKQKGHYVGTLTARDDNKIRWALIADKLQNEREYRLDWAKWKAKIQSPVDMLSILHSKNSQALVSDMDYRNYLHQWTCMPDQNDVIQAKKAYELQSDNVYKADLEWLRGIGWMPNDSVSVNHAKHAADIFSEKKYRTKIETLNFTPVDDRVDYVTAKQSGEILDDIKYRKDWNATKSKYTLTETPLLHTAQEAARILDQYLYKEGWERQKATGYILPPDAVPFVHAHHCNDVQSELKYKAEHVKQKGHYVGVPTMRDDPKLVWFEHAGQIQNERLYKEDYHKTKAKINIPADMVSVLAAKQGQTLVSDIDYRNYLHQWMCHPDQNDVIQARKAYDLQSDNVYRADLEWLRGIGWIPLDSVDHVRVTKNQEMMSQIKYKKNALENYPNFRSVVDPPEIVLAKINSVNQSDVKYKETFNKAKGKYTFSPDTPHISHSKDMGKLYSTILYKGAWEGTKAYGYTLDERYIPIVGAKHADLVNSELKYKETYEKQKGHYLAGKVIGEFPGVVHCLDFQKMRSALNYRKHYEDTKANVHIPNDMMNHVLAKRCQYILSDLEYRHYFHQWTSLLEEPNVIRVRNAQEILSDNVYKDDLNWLKGIGCYVWDTPQILHAKKSYDLQSQLQYTAAGKENLQNYNLVTDTPLYVTAVQSGINASEVKYKENYHQIKDKYTTVLETVDYDRTRNLKNLYSSNLYKEAWDRVKATSYILPSSTLSLTHAKNQKHLASHIKYREEYEKFKALYTLPRSVDDDPNTARCLRVGKLNIDRLYRSVYEKNKMKIHIVPDMVEMVTAKDSQKKVSEIDYRLRLHEWICHPDLQVNDHVRKVTDQISDIVYKDDLNWLKGIGCYVWDTPEILHAKHAYDLRDDIKYKAHMLKTRNDYKLVTDTPVYVQAVKSGKQLSDAVYHYDYVHSVRGKVAPTTKTVDLDRALHAYKLQSSNLYKTSLRTLPTGYRLPGDTPHFKHIKDTRYMSSYFKYKEAYEHTKAYGYTLGPKDVPFVHVRRVNNVTSERLYRELYHKLKDKIHTTPDTPEIRQVKKTQEAVSELIYKSDFFKMQGHMISLPYTPQVIHCRYVGDITSDIKYKEDLQVLKGFGCFLYDTPDMVRSRHLRKLWSNYLYTDKARKMRDKYKVVLDTPEYRKVQELKTHLSELVYRAAGKKQKSIFTSVPDTPDLLRAKRGQKLQSQYLYVELATKERPHHHAGNQTTALKHAKDVKDMVSEKKYKIQYEKMKDKYTPVPDTPILIRAKRAYWNASDLRYKETFQKTKGKYHTVKDALDIVYHRKVTDDISKIKYKENYMSQLGIWRSIPDRPEHFHHRAVTDTVSDVKYKEDLTWLKGIGCYAYDTPDFTLAEKNKTLYSKYKYKEVFERTKSDFKYVADSPINRHFKYATQLMNEKKYRADYEQRKDKYHLVVDEPRHLLAKTAGDQISQRKYKSSAKMFLQHGCNEILRPDMLTALYNSHMWSQIKYRKNYEKSKDKFTSIVDTPEHLRTTKVNKQISDILYKLEYNKAKPRGYTTIHDTPMLLHVRKVKDEVSDLKYKEVYQRNKSNCTIEPDAVHIKAAKDAYKVNTNLDYKKQYEANKAHWKWTPDRPDFLQAAKSSLQQSDFEYKLDREFLKGCKLSVTDDKNTVLALRNTLIESDLKYKEKHVKERGTCHAVPDTPQILLAKTVSNLVSENKYKDHVKKHLAQGSYTTLPETRDTVHVKEVTKHVSDTNYKKKFVKEKGKSNYSIMLEPPEVKHAMEVAKKQSDVAYRKDAKENLHYTTVADRPDIKKATQAAKQASEVEYRAKHRKEGSHGLSMLGRPDIEMAKKAAKLSSQVKYRENFDKEKGKTPKYNPKDSQLYKVMKDANNLASEVKYKADLKKLHKPVTDMKESLIMNHVLNTSQLASSYQYKKKYEKSKGHYHTIPDNLEQLHLKEATELQSIVKYKEKYEKERGKPMLDFETPTYITAKESQQMQSGKEYRKDYEESIKGRNLTGLEVTPALLHVKYATKIASEKEYRKDLEESIRGKGLTEMEDTPDMLRAKNATQILNEKEYKRDLELEVKGRGLNAMANETPDFMRARNATDIASQIKYKQSAEMEKANFTSVVDTPEIIHAQQVKNLSSQKKYKEDAEKSMSYYETVLDTPEIQRVRENQKNFSLLQYQCDLKNSKGKITVVQDTPEILRVKENQKNFSSVLYKEDVSPGTAIGKTPEMMRVKQTQDHISSVKYKEAIGQGTPIPDLPEVKRVKETQKHISSVMYKENLGTGIPTTVTPEIERVKRNQENFSSVLYKENLGKGIPTPITPEMERVKRNQENFSSILYKENLSKGTPLPVTPEMERVKLNQENFSSVLYKENVGKGIPIPITPEMERVKHNQENFSSVLYKENLGTGIPIPITPEMQRVKHNQENLSSVLYKENMGKGTPLPVTPEMERVKHNQENISSVLYKENMGKGTPLPVTPEMERVKHNQENISSVLYKENMGKGTPLAVTPEMERVKHNQENISSVLYKENVGKATATPVTPEMQRVKRNQENISSVLYKENLGKATPTPFTPEMERVKRNQENFSSVLYKENMRKATPTPVTPEMERAKRNQENISSVLYSDSFRKQIQGKAAYVLDTPEMRRVRETQRHISTVKYHEDFEKHKGCFTPVVTDPITERVKKNMQDFSDINYRGIQRKVVEMEQKRNDQDQETITGLRVWRTNPGSVFDYDPAEDNIQSRSLHMINVQAQRRSREQSRSASALSISGGEEKSEHSEAPDHHLSTYSDGGVFAVSTAYKHAKTTELPQQRSSSVATQQTTVSSIPSHPSTAGKIFRAMYDYMAADADEVSFKDGDAIINVQAIDEGWMYGTVQRTGRTGMLPANYVEAI

SEQ ID NO: 3812 - protein, 484 aa, Homo sapiens; identical to SEQ ID NO: 3143

SEQ ID NO: 3813 - protein, 406 aa, Homo sapiens
MSKQVSLPEMIKDWTKEHVKKWVNEDLKINEQYGQILLSEEVTGLVLQELTEKDLVEMGLPWGPALLIKRSYNKLNSKSPESDNHDPGQLDNSKPSKTEHQKNPKHTKKEEENSMSSNIDYDPREIRDIKQEESILMKENVLDEVANAKHKKKLEALRADRFAGLLEYLNPNYKDATTMESIVNEYAFLLQQNSKKPMTNEKQNSILANIILSCLKPNSKLIQPLTTLKKQLREVLQFVGLSHQYPGPYFLACLLFWPENQELDQDSKLIEKYVSSLNRSFRGQYKRMCRSKQASTLFYLGKRKGLNSIVHKAKIEQYFDKAQNTNSLWHSGDVWKKNEVKDLLRRLTGQAEGKLISVEYGTEEKIKIPVISVYSGPLRSGRNIERVSFYLGFSIEGPLAYDIEVI

SEQ ID NO: 3814 - protein, 1069 aa, Homo sapiens
LIAVFEEQEPLHKIESPSGNPADRQSPDAFETEVAAQLAAFKPIGGEIEVTPSALKLGTPLLVRRSSDPVPGPPADTQPSASHPGGQSLKLVVPDSTQNLEDREVLNGVQTELLTSPRTKDTLSDMTRTVEISGEGGPLGIHVVPFFSSLSGRILGLFIRGIEDNSRSKREGLFHENECIVKINNVDLVDKTFAQAQDVFRQAMKSPSVLLHVLPPQNREQYEKSVIGSLNIFGNNDGVLKTKVPPPVHGKSGLKTANLTGTDSPETDASASLQQNKSPRVPRLGGKPSSPSLSPLMGFGSNKNAKKIKIDLKKGPEGLGFTVVTRDSSIHGPGPIFVKNILPKGAAIKDGRLQSGDRILEVNGRDVTGRTQEELVAMLRSTKQGETASLVIARQEGHFLPRELDGRLRMNDQLIAVNGESLLGKSNHEAMETLRRSMSMEGNIRGMIQLVILRRPERPMEDPAECGAFSKPCFENCQNAVTTSRRNDNSILHPLGTCSPQDKQKGLLLPNDGWAESEVPPSPTPHSALGLGLEDYSHSSGVDSAVYFPDQHINFRSVTPARQPESINLKASKSMDLVPDESKVHSLAGQKSESPSKDFGPTLGLKKSSSLESLQTAVAEVRKNDLPFHRPRPHMVRGRGCNESFRAAIDKSYDGPEEIEADGLSDKSSHSGQGALNCESAPQGNSELEDMENKARKVKKTKEKEKKKEKGKLKVKEKKRKEENEDPERKIKKKGFGAMLRFGKKKEDKGGKAEQKGTLKHGGLREEELEKMKEERERIGAKHQELREKQARGLLDYATGAIGSVYDMDDDEMDPNYARVNHFREPCTSANVFRSPSPPRAGPFGYPRDGHPLSPERDHLEGLYAKVNKPYHPLVPADSGRPTGGSTDRIQKLRKEYYQARREGFPLYEDDEGRARPSEYDLLWVPGRGPDGNAHNLRFEGMERQYASLPRGGPADPVDYLPAAPRGLYKERELPYYPGAHPMHPPKGSYPRPTELRVADLRYPQHYPPPPAPQHKGPFRQDVPPSPPQHQRMPAYQETGRPGPRGGSPDQYPYRTQDSRQKNPMTAAV

SEQ ID NO: 3815 - protein, 1682 aa, Homo sapiens
MFRQFYLWTCLASGIILGSLFEICLGQYDDDWQYEDCKLARGGPPATIVAIDEESRNGTILVDNMLIKGTAGGPDPTIELSLKDNVDYWVLMDPVKQMLFLNSTGRVLDRDPPMNIHSIVVQVQCINKKVGTIIYHEVRIVVRDRNDNSPTFKHESYYATVNELTPVGTTIFTGFSGDNGATDIDDGPNGQIEYVIQYNPDDPTSNDTFEIPLMLTGNIVLRKRLNYEDKTRYFVIIQANDRAQNLNERRTTTTTLTVDVLDGDDLGPMFLPCVLVPNTRDCRPLTYQAAIPELRTPEELNPIIVTPPIQAIDQDRNIQPPSDRPGILYSILVGTPEDYPRFFHMHPRTAELSLLEPVNRDFHQKFDLVIKAEQDNGHPLPAFAGLHIEILDENNQSPYFTMPSYQGYILESAPVGATISDSLNLTSPLRIVALDKDIEDTKDPELHLFLNDYTSVFTVTQTGITRYLTLLQPVDREEQQTYTFSITAFDGVQESEPVIVNIQVMDANDNTPTFPEISYDVYVYTDMRPGDSVIQLTAVDADEGSNGEITYEILVGAQGDFIINKTTGLITIAPGVEMIVGRTYALTVQAADNAPPAERRNSICTVYIEVLPPNNQSPPRFPQLMYSLEISEAMRVGAVLLNLQATDREGDSITYAIENGDPQRVFNLSETTGILTLGKALDRESTDRYILIITASDGRPDGTSTATVNIVVTDVNDNAPVFDPYLPRNLSVVEEEANAFVGQVKATDPDAGINGQVHYSLGNFNNLFRITSNGSIYTAVKLNREVRDYYELVVVATDGAVHPRHSTLTLAIKVLDIDDNSPVFTNSTYTVLVEENLPAGTTILQIEAKDVDLGANVSYRIRSPEVKHFFALHPFTGELSLLRSLDYEAFPDQEASITFLVEAFDIYGTMPPGIATVTVIVKDMNDYPPVFSKRIYKGMVAPDAVKGTPITTVYAEDADPPGLPASRVRYRVDDVQFPYPASIFEVEEDSGRVITRVNLNEEPTTIFKLVVVAFDDGEPVMSSSATVKILVLHPGEIPRFTQEEYRPPPVSELATKGTMVGVISAAAINQSIVYSIVSGNEEDTFGINNITGVIYVNGPLDYETRTSYVLRVQADSLEVVLANLRVPSKSNTAKVYIEIQDENNHPPVFQKKFYIGGVSEDARMFTSVLRVKATDKDTGNYSVMAYRLIIPPIKEGKEGFVVETYTGLIKTAMLFHNMRRSYFKFQVIATDDYGKGLSGKADVLVSVVNQLDMQVIVSNVPPTLVEKKIEDLTEILDRYVQEQIPGAKVVVESIGARRHGDAFSLEDYTKCDLTVYAIDPQTNRAIDRNELFKFLDGKLLDINKDFQPYYGEGGRILEIRTPEAVTSIKKRGESLGYTEGALLALAFIIILCCIPAILVVLVSYRQFKVRQAECTKTARIQAALPAAKPAVPAPAPVAAPPPPPPPPPGAHLYEELGDSSMHKYEMPQYGSRRRLLPPAGQEEYGEVVGEAEEEYEEEEWARKRMIKLVVDREYETSSTGEDSAPECQRNRLHHPSIHSNINGNIYIAQNGSVVRTRRACLTDNLKVASPVRLGGPFKKLDKLAVTHEENVPLNTLSKGPFSTEKMNARPTLVTFAPCPVGTDNTAVKPLRNRLKSTVEQESMIDSKNIKEALEFHSDHTQSDDEELWMGPWNNLHIPMTKL

SEQ ID NO: 3816 - protein, 254 aa, Homo sapiens
MAKPCGVRLSGEARKQVEVFRQNLFQEAEEFLYRFLPQKIIYLNQLLQEDSLNVADLTSLRAPLDIPIPDPPPKDDEMETDKQEKKEGKRDKRKGLNPLFLTVHKCGFLPGNEKVLSLLALVKPEVWTLKEKCILVITWIQHLIPKIEDGNDFGVAIQEKVLERVNAVKTKVEAFQTTISKYFSERGDAVAKASKETHVMDYRALVHERDEAAYGELRAMVLDLRAFYAELYHIISSNLEKIVNPKGEEKPSMY

SEQ ID NO: 3817 - protein, 55 aa, Homo sapiens
MAAALFVLLGFALLGTHGASGAAGTVFTTVEDLGSKILLTCSLNDSATEQRAAPE

SEQ ID NO: 3818 - protein, 355 aa, Homo sapiens
MEEGERSPLLSQETAGQKPLSVHRPPTSGCLGPVPREDQAEAWGCSCCPPETKHQALSGTPKKGPAPSLSPGSSCVKYLIFLSNFPFSLLGLLALAIGLWGLAVKGSLGSDLGGPLPADPMLGLALGGLVVSAVSLAGYLGALCENTCLLRGFSGGILAFLVLEAVAGALVVALWGPLQDSLEHTLRVAIAHYQDDPDLRFLLDQVQLGLRCCGAASYQDWQQNLYFNCSSPGVQACSLPASCCIDPREDGASVNDQCGFGVLRLDADAAQRVVYLEGCGPPLRRWLRANLAASGGYAIAVVLLQGAELLLAARLLGALAARRGAAYGPGARGEDRAGPQSPSPGAPPAAKPARG

SEQ ID NO: 3819 - protein, 1964 aa, Homo sapiens
MFRQFYLWTCLASGIILGSLFEICLGQYDDDWQYEDCKLARGGPPATIVAIDEESRNGTILVDNMLIKGTAGGPDPTIELSLKDNVDYWVLMDPVKQMLFLNSTGRVLDRDPPMNIHSIVVQVQCINKKVGTIIYHEVRIVVRDRNDNSPTFKHESYYATVNELTPVGTTIFTGFSGDNGATDIDDGPNGQIEYVIQYNPDDPTSNDTFEIPLMLTGNIVLRKRLNYEDKTRYFVIIQANDRAQNLNERRTTTTTLTVDVLDGDDLGPMFLPCVLVPNTRDCRPLTYQAAIPELRTPEELNPIIVTPPIQAIDQDRNIQPPSDRPGILYSILVGTPEDYPRFFHMHPRTAELSLLEPVNRDFHQKFDLVIKAEQDNGHPLPAFAGLHIEILDENNQSPYFTMPSYQGYILESAPVGATISDSLNLTSPLRIVALDKDIEDTKDPELHLFLNDYTSVFTVTQTGITRYLTLLQPVDREEQQTYTFSITAFDGVQESEPVIVNIQVMDANDNTPTFPEISYDVYVYTDMRPGDSVIQLTAVDADEGSNGEITYEILVGAQGDFIINKTTGLITIAPGVEMIVGRTYALTVQAADNAPPAERRNSICTVYIEVLPPNNQSPPRFPQLMYSLEISEAMRVGAVLLNLQATDREGDSITYAIENGDPQRVFNLSETTGILTLGKALDRESTDRYILIITASDGRPDGTSTATVNIVVTDVNDNAPVFDPYLPRNLSVVEEEANAFVGQVKATDPDAGINGQVHYSLGNFNNLFRITSNGSIYTAVKLNREVRDYYELVVVATDGAVHPRHSTLTLAIKVLDIDDNSPVFTNSTYTVLVEENLPAGTTILQIEAKDVDLGANVSYRIRSPEVKHFFALHPFTGELSLLRSLDYEAFPDQEASITFLVEAFDIYGTMPPGIATVTVIVKDMNDYPPVFSKRIYKGMVAPDAVKGTPITTVYAEDADPPGLPASRVRYRVDDVQFPYPASIFEVEEDSGRVITRVNLNEEPTTIFKLVVVAFDDGEPVMSSSATVKILVLHPGEIPRFTQEEYRPPPVSELATKGTMVGVISAAAINQSIVYSIVSGNEEDTFGINNITGVIYVNGPLDYETRTSYVLRVQADSLEVVLANLRVPSKSNTAKVYIEIQDENNHPPVFQKKFYIGGVSEDARMFTSVLRVKATDKDTGNYSVMAYRLIIPPIKEGKEGFVVETYTGLIKTAMLFHNMRRSYFKFQVIATDDYGKGLSGKADVLVSVVNQLDMQVIVSNVPPTLVEKKIEDLTEILDRYVQEQIPGAKVVVESIGARRHGDAFSLEDYTKCDLTVYAIDPQTNRAIDRNELFKFLDGKLLDINKDFQPYYGEGGRILEIRTPEAVTSIKKRGESLGYTEGALLALAFIIILCCIPAILVVLVSYRQVFKGRQAECTKTARIQAALPAAKPAVPAPAPVAAPPPPPPPPPGAHLYEELGDSSILSSLFLLYHFQQSRGNNSVSEDRKHQQVVMPFSSNTIEAHKSAHVDGSLKSNKLKSARKFTFLSDEDDLSAHNPLYKENISQVSTNSDISQRTDFVDPFSPKIQAKSKSLRGPREKIQRLWSQSVSLPRRLMRKVPNRPEIIDLQQWQGTRQKAENENTGICTNKRGSSNPLLTTEEANLTEKEEIRQGETLMIEGTEQLKSLSSDSSFCFPRPHFSFSTLPTVSRTVELKSEPNVISSPAECSLELSPSRPCVLHSSLSRRETPICMLPIETERNIFENFAHPPNISPSACPLPPPPPISPPSPPPAPAPLAPPPDISPFSLFCPPPSPPSIPLPLPPPTFFPLSVSTSGPPTPPLLPPFPTPLPPPPPSIPCPPPPSASFLSTECVCITGVKCTTNLMPAEKIKSSMTQLSTTTVCKTDPQREPKGILRHVKNLAELEKSVANMYSQIEKNYLRTNVSELQTMCPSEVTNMEITSEQNKGSLNNIVEGTEKQSHSQSTSL

SEQ ID NO: 3820 - protein, 624 aa, Homo sapiens
MVGRSPSATPAERPPRGCAELAQRQQHEPDPRIGRAPVESRLLREAGPTPARAAGQLEYETQIKKMLCSKDSLGLKEELTDEDREKVAVHEGINSGTAMSRGLYQPATIFMGRQMSAILSMRDFSTEHKSPQPTKNFSIPDPHSHRQTAQSSNVTDSCVVQTSNDTQCLNKSDNIDGKASLQIGEKMPVTASVLSEEEQTHCLEIGSNTRHGKSNLSEGKKSAELNSPLRERLSPENRTTDLKCDSSSGSEGEILTREHIEVEEKRASPPVSPIPVSEYCESENKWSQEKHSPWEGVSDHLAHREPKSQKPFRKMQEEEEESWSTSSDLTISISEDDLILESPEPQPNPGGKMEGEDGIEALKLIHAEQERVALSTEKNCILQTLSSPDSEKESSTNAPTREPGQTPDSDVPRAQVGQHVATLKEHDNSVKEEATALLRKALTEECGRRSAIHSSESSCSLPSILNDNSGIKEAKPAVWLNSVPTREQEVSSGCGDKSKKENVAADIPITETEAYQLLKKATLQDNTNQTENRFQKTDASVSHLSGLNIGSGAFETKTANKIASEASFSSSEGSPLSRHENKKKPVINLKSNALWDESDDSNSEIEAALRPRNHNTDDSDDFYD

SEQ ID NO: 3821 - protein, 1174 aa, Homo sapiens
MAVETLSPDWEFDRVDDGSQKIHAEVQLKNYGKFLEEYTSQLRRIEDALDDSIGDVWDFNLDPIALKLLPYEQSSLLELIKTENKVLNKVITVYAALCCEIKKLKYEAETKFYNGLLFYGEGATDASMVEGDCQIQMGRFISFLQELSCFVTRCYEVVMNVVHQLAALYISNKIAPKIIETTGVHFQTMYEHLGELLTVLLTLDEIIDNHITLKDHWTMYKRLLKSVHHNPSKFGIQEEKLKPFEKFLLKLEGQLLDGMIFQACIEQQFDSLNGGVSVSKNSTFAEEFAHSIRSIFANVEAKLGEPSEIDQRDKYVGICGLFVLHFQIFRTIDKKFYKSLLDICKKVPAITLTANIIWFPDNFLIQKIPAAAKLLDRKSLQAIKIHRDTFLQQKAQSLTKDVQSYYVFVSSWMMKMESILSKEQRMDKFAEDLTNRCNVFIQVGFLYAYSISTIIKTTMNLYMSMQKPMTKTSVKALCRLVELLKAIEHMFYRRSMVVADSVSHITQHLQHQALHSISVAKKRVISDKKYSEQRLDVLSALVLAENTLNGPSTKQRRLIVSLALSVGTQMKTFKDEELFPLQVVMKKLDLISELRERVQTQCDCCFLYWHRAVFPIYLDDVYENAVDAARLHYMFSALRDCVPAMMHARHLESYEILLDCYDKEIMEILNEHLLDKLCKEIEKDLRLSVHTHLKLDDRNPFKVGMKDLALFFSLNPIRFFNRFIDIRAYVTHYLDKTFYNLTTVALHDWATYSEMRNLATQRYGLVMTEAHLPSQTLEQGLDVLEIMRNIHIFVSRYLYNLNNQIFIERTSNNKHLNTINIRHIANSIRTHGTGIMNTTVNFTYQFLKKKFYIFSQFMYDEHIKSRLIKDIRFFREIKDQNDHKYPFDRAEKFNRGIRKLGVTPEGQSYLDQFRQLISQIGNAMGYVRMIRSGGLHCSSNAIRFVPDLEDIVNFEELVKEEGLAEETLKAARHLDSVLSDHTRNSAEGTEYFKMLVDVFAPEFRRPKNIHLRNFYIIVPPLTLNFVEHSISCKEKLNKKNKIGAAFTDDGFAMGVAYILKLLDQYREFDSLHWFQSVREKYLKEIRAVAKQQNVQSASQDEKLLQTMNLTQKRLDVYLQEFELLYFSLSSARIFFRADKTAAEENQEKKEKEEETKTSNGDLSDSTVSADPVVK

SEQ ID NO: 3822 - protein, 698 aa, Homo sapiens
MQDGASLSDSTEDEEEGASLGDGSGAEGGSCSSSRRSGGDGGDEVEGSGVGAGEGETVQHFPLARPKSLMQKLQCSFQTSWLKDFPWLRYSKDTGLMSCGWCQKTPADGGSVDLPPVGHDELSRGTRNYKKTLLLRHHVSTEHKLHEANAQESEIPSEEGYCDFNSRPNENSYCYQLLRQLNEQRKKGILCDVSIVVSGKIFKAHKNILVAGSRFFKTLYCFSNKESPNQNNTTHLDIAAVQGFSVILDFLYSGNLVLTSQNAIEVMTVASYLQMSEVVQTCRNFIKDALNISIKSEAPESVVVDYNNRKPVNRDGLSSSRDQKIASFWATRNLTNLASNVKIENDGCNVDEGQIENYQMNDSSWVQDGSPEMAENESEGQTKVFIWNNMGSQGIQETGKTRRKNQTTKRFIYNIPPNNETNLEDCSVMQPPVAYPEENTLLIKEEPDLDGALLSGPDGDRNVNANLLAEAGTSQDGGDAGTSHDFKYGLMPGPSNDFKYGLIPGTSNDFKYGLIPGASNDFKYGLLPESWPKQETWENGESSLIMNKLKCPHCSYVAKYRRTLKRHLLIHTGVRSFSCDICGKLFTRREHVKRHSLVHKKDKKYKCMVCKKIFMLAASVGIRHGSRRYGVCVDCADKSQPGGQEGVDQGQDTEFPRDEEYEENEVGEADEELVDDGEDQNDPSRWDESGEVCMSLDD

SEQ ID NO: 3823 - protein, 221 aa, Homo sapiens
MAAALFVLLGFALLGTHGASGAVFTTVEDLGSKILLTCSLNDSATEVTGHRWLKGGVVLKEDALPGQKTEFKVDSDDQWGEYSCVFLPEPMGTANIQLHGPPRVKAVKSSEHINEGETAMLVCKSESVPPVTDWAWYKITDSEDKALMNGSESRFFVSSSQGRSELHIENLNMEADPGQYRCNGTSSKGSDQAIITLRVRSHLAALWPFLGIVAEVLVLVT

SEQ ID NO: 3824 - protein, 152 aa, Homo sapiens [sequence omitted]

SEQ ID NO: 3825 - protein, 1230 aa, Homo sapiens
MVTQIRNQSKASGSGLCEGDEVVSINGNPCADLTYPEVIKLMESITDSLQMLIKRPSSGISEALISENENKNLEHLTHGGYVESTTLQIRPATKTQCTEFFLAPVKTEVPLAENQRSGPDCAGSLKEETGPSYQRAPQMPDSQRGRVAEELILREKVEAVQPGPVVELQLSLSQERHKGASGPLVALPGAEKSKSPDPDPNLSHDRIVHINSIPTNEKADPFLRSSKIIQISSGRELRVIQESEAGDAGLPRVEVILDCSDRQKTEGCRLQAGKECVDSPVEGGQSEAPPSLVSFAVSSEGTEQGEDPRSEKDHSRPHKHRARHARLRRSESLSEKQVKEAKSKCKSIALLLTDAPNPNSKGVLMFKKRRRRARKYTLVSYGTGELEREADEEEEGDKEDTCEVAFLGASESEVDEELLSDVDDNTQVVNFDWDSGLVDIEKKLNRGDKMEMLPDTTGKGALMFAKRRERMDQITAQKEEDKVGGTPSREQDAAQTDGLRTTTSYQRKEEESVRTQSSVSKSYIEVSHGLGHVPQQNGFSGTSETANIQRMVPMNRTAKPFPGSVNQPATPFSPTRNMTSPIADFPAPPPYSAVTPPPDAFSRGVSSPIAGPAQPPPWPQPAPWSQPAFYDSSERIASRDERISVPAKRTGILQEAKRRSTTKPMFTFKEPKVSPNPELLSLLQNSEGKRGTGAGGDSGPEEDYLSLGAEACNFMQSSSAKQKTPPPVAPKPAVKSSSSQPVTPVSPVWSPGVAPTQPPAFPTSNPSKGTVVSSIKIAQPSYPPARPASTLNVAGPFKGPQAAVASQNYTPKPTVSTPTVNAVQPGAVGPSNELPGMSGRGAQLFAKRQSRMEKYVVDSDTVQAHAARAQSPTPSLPASWKYSSNVRAPPPVAYNPIHSPSYPLAALKSQPSAAQPSKMGKKKGKKPLNALDVMKHQPYQLNASLFTFQPPDAKDGLPQKSSVKVNSALAMKQALPPRPVNAASPTNVQASSVYSVPAYTSPPSFFAEASSPVSASPVPVGIPTSPKQESASSSYFVAPRPKFSAKKSGVTIQESGRSLSLPGRSVPPPISTSPWVYQPTYSYSSKPTDGLEKANKRPTPWEAAAKSPLGLVDDAFQPRNIQESIVANVVSAARRKVLPGPPEDWNERLSYIPQTQKAYMGSCGRQEYNVTANNNMSTTSQYGSQLPYAYYRQASRNDSAIMSMETRSDYCLPVADYNYNPHPRGWRRQT

SEQ ID NO: 3826 - protein, 478 aa, Homo sapiens
MATALVSAHSLAPLNLKKEGLRVVREDHYSTWEQGFKLQGNSKGLGQEPLCKQFRQLRYEETTGPREALSRLRELCQQWLQPETHTKEQILELLVLEQFLIILPKELQARVQEHHPESREDVVVVLEDLQLDLGETGQQDPDQPKKQKILVEEMAPLKGVQEQQVRHECEVTKPEKEKGEETRIENGKLIVVTDSCGRVESSGKISEPMEAHNEGSNLERHQAKPKEKIEYKCSEREQRFIQHLDLIEHASTHTGKKLCESDVCQSSSLTGHKKVLSREKGHQCHECGKAFQRSSHLVRHQKIHLGEKPYQCNECGKVFSQNAGLLEHLRIHTGEKPYLCIHCGKNFRRSSHLNRHQRIHSQEEPCECKECGKTFSQALLLTHHQRIHSHSKSHQCNECGKAFSLTSDLIRHHRIHTGEKPFKCNICQKAFRLNSHLAQHVRIHNEEKPYQCSECGEAFRQRSGLFQHQRYHHKDKLA

SEQ ID NO: 3827 - protein, 2057 aa, Homo sapiens
MLRLVVQSAKIDPPLAPLPRPCMSIDFRDIKKRTRVVEGNDPVWNETLIWHLWNRPLENDSFLQVTLQDMGSQKKERFIGLATVLLKPLLKQPSEVLFVKDLTLLNHSMKPTDCTVTLQVAHMSNQDIEKTGAEDHLGITAREAASQKLMVPGSTAHRALSSKPQHFQVRVKVFEARQLMGNNIKPVVKVSIAGQQHQTRIKMGNNPFFNEIFFQNFHEVPAKFFDETILIQVVNSSAMRYKAEIGRFQTDIGFIYHSPGHTLLRKWLGLCQPNNPGSGVTGYLKVTIYALGVGDQALIDQKLLYGTDDTDIQIFKSAVVPINMAYLQLFIYCAEDLHLKKHQSVNPQLEVELIGEKLRTHMQTQTDNPIWNQILTFRIQLPCLSSYIKFRVLDCRKKDCPDEIGTASLSLNQISSTGEEIEGVYSGFLPCFGPSFLTLHGGKKAPFRIQEEGACIPDSVRDGLAYRGRVFLELITQIKSYQDSTIKDLSHEVTRIEKHQNRQKYGLCVIFLSCTMMPNFKELIHFEVSIGHYGNKMDLNYKPLVSSTPYSPVIYDGNIYHYVPWYNTKPVVAVTSNWEDVSFRMNCLNLLHFTRDRLKANLDTLKSTRNPKDPALLYQWEKLLRELAEDCKRPLPCMTYQPKATSLDRKRWQLRSLLLQELAQKAKQAKPKDMVATAEDWLYRLNTVLPEPQMGLPDVMIWLVAKEQRVAYAQVPAHSVLFSPAGALHSGRLCGKIQTLFLQYPEGEGQKDVLPAHLRVCMWLGNVTDSKDLQLLRQGDTAVYAEMYENQAKYKDQWGQQGLYHCPNFSDVMGNKTLPMTDFQPPLGWHWQDSWTVEPQRRLLLDIDINKSQVLEEVYENQGRDTRGAWGPAAIPNTDVNGQPMEARENVKCPQGWHFKKDWVVELNHAVDSKGWEYGVGIPPSGLPQVWSPVEKTYHSCRRRRWARVRFRNHGELSHEQETLSFLQLGLAKGEEEGWEYDTFGSKFHLNPQPQSRFRRRCWRRRLAPNKDKGIAPIFLLEGSLAMDLKYHAGKEEDSKTWPWGLDRQFRDPQRQDTRPPNLPFIYCTFNKPHYYQLFCYIYQARNLVSNQILTFQGPFIRVVFLNHSQCTQTLRSSAGPTWAQTLIFQHLLLYENPQDTKESPPLVVLELWQRDFWGKESLWGRSVWPPMVWLDLQDRILPPMRWHPLVKELGKEEGEILASCELILQTEKLGEKQLPILSVPWKNGAYTLPKSIQPTIKRMAIEILAWGLRNMKKASSPQLLVEFGEESLRTEPIRDFQTNPNFPESESVLVLTVLMPTEEAYALPLVVKVVDNWAFGQQTVTGQANIDFLQPYFCDPWAQDYMHPKLPTLSEKKHQDFLGYLYRKFWFKSSKAEDEYEHEVDWWSKLFWATDEHKSLKYKYKDYHTLKVYECELEAVPAFQGLQDFCQTFKLYQEQPKLDSPVVGEFKGLFRIYPFPENPEAPKPPLQFLVWPEREDFPQPCLVRVYMVRAINLQPQDYNGLCDPYVILKLGKTELGNRDMYQPNTLDPIFGMMFELTCNIPLEKDLEIQLYDFDLFSPDDKIGTTVIDLENRLLSGFGAHCGLSKSYCQSGPFRWRDQMPPSYLLERYAKRKGLPPPLFSPEEDAVFYNGKKFKLQSFEPKTPTVHGLGPKKERLALYLLHTQGLVPEHVETRTLYSHSQPGIDQGKVQMWVDIFPKKLGPPGPQVNINPRKPKRYELRCIIWKTANVDLVDDNLSREKTSDIYIKGWLYGLEKDMQKTDIHYHSLTGEADFNWRFIFTMDYLAAERTCVQSQKDYIWSLDATSMKFPARLIIQVWDNDIFSPDDFLGVLELDLSDMPLPARHAKQCSIRMMDADPKWPYFIQYKHFSLFKKKTVTGWWPCQVLDGGKWRLSGKVKMSLEILSEKEALIKPAGRGQSEPNQYPTLHPPLRTNTSFTWLRSPVQNFCYIFWKRYRFKLIAFMVISIIALMLFNFIYSAPHYLAMSWIKPQLQLYPPIKIFNIINSLNTSNASSSILPTQDPNLKPTIDHEWKLHPGPTNHLSDIFPELPAPGD

SEQ ID NO: 3828 - protein, 5059 aa, Homo sapiens
MPGAPLLRLLTAVSAAVAVAVAGAPGTVMPPTTGDATLAFVFDVTGSMWDELMQVIDGASRILERSLSRRSQAIANYALVPFHDPDIGPVTLTADPTVFQRELRELYVQGGGDCPEMSVGAIKAAVEVANPGSFIYVFSDARAKDYHKKEELLRLLQLKQSQVVFVLTGDCGDRTHPGYLAYEEIAATSSGQVFHLDKQQVTEVLKWVESAIQASKVHLLSTDHEEEGEHTWRLPFDPSLKEVTISLSGPGPEIEVQDPLGRILQEDEGLNVLLNIPDSAKVVAFKPEHPGLWSIKVYSSGRHSVRITGVSNIDFRAGFSTQPLLDLNHTLEWPLQGVPISLVINSTGLKAPGRLDSVELAQSSGKPLLTLPTKPLSNGSTHQLWGGPPFHTPKERFYLKVKGKDHEGNPLLRVSGVSYSGVAPGAPLVSMAPRIHGYLHQPLLVSCSVHSALPFRLQLRRGEARLGEERHFQESGNSSWEILRASKAEEGTYECTAVSRAGTGRAKAQIVVTDPPPQLVPAPNVTVSPGETAVLSCRVLGEAPYNLTWVRDWRVLPASTGRVAQLADLSLEISGIIPTDGGRYQCVASNANGVTRASVWLLVREAPQVSIHTSSQHFSQGVEVKVSCSASGYPTPHISWSRESQALQEDSRIHVDAQGTLIIQGVAPEDAGNYSCQATNEVGTDQETVTLYYTDPPSVSAVNAVVLVAVGEEAVLVCEASGVPPPRVIWYRGGLEMILAPEGSSSGKLRIPAAQERDAGTYTCRAVNELGDASAEIQLAVGHAPQLTELPRDVTVELGRSALLACRATGRPPPTVTWRRGDGQPLGLRLGAGRGSRSRQPDSGVLFFESVAPEDQAPYVCEARNVFGKVQAEARLIVTGHAPPQIASSAPTVRVLEGQPVSLPCIVLAGRPLPERHWLKDGRPLPPGSRHSIRADGSLHLDRALQEHAGRYSCVATNTAGSQHRDVELVVQVPPRIHPTATHHITNEGVAASLPCVASGVPAPTITWTKETNALTSRGPHYNVSKEGTLLIAQPSAQDAGAYVCTATNTVGFSSQEMRLSVNTKPRIHMNGSRNADVPLQVTAKAGEEVTLDCEAKGSPPPLVTWTKDSRPVPPITNRYGLLPSGSLRLAQVQVGDSGHYECTASNPAGSASHRYVLGVQVPPQVQPGPRVLKVLVGEALDLNCVAEGNPEPQLSWSKDGVVLQGRGPQGSVHFAAIRTSDAGRYRCEASNSAGVDAWEVELRVLEPPHWGADETSGLLERVAGENASLPCPARGTPKPQVTWRKGPSSEPLHGQPGVAVLEEGSLFLASVSPADSGDYECQATNEVGSTSRRAKLVVYVPPSIREDGRKANVSGMAGQSLTLECDANGFPVPEIVWLKDAQLIPKVGGHRLLDEGQSLHFPRIQEGDSGLYSCRAENQAGTAQRDFHLLVLTPPSVLGAGAAQEVLGLAGADVELQCWTSGVPTPQVEWTKDRQPVLPGGPHLQVQEDGQVLRITGSHVGDEGRYQCVAFSPAGQQARDFQLRVHAPPTIWGSNETGEVAVMEDHLVQLLCEARGVPTPNITWFKDGALLPTSTKVVYTRGGRQLQLGRAQSSDAGVYTCKASNAVGAAEKATRLDVYVPPTIEGAGGRPYVVKAVAGRPVALECVARGHPSPTLSWHHEGLPVAESNESRLETDGSVLRLESPGEASSGLYSCVASSPAGEAVLQYSVEVQVPPQLLVAEGLGQVTTIVGQPLELPCQASGSPVPTIQWLQNGRPAEELAGVQVASQGTTLHIDHVELDHSGLFACQATNEAGTAGAEVEVSVHEFPSVSIIGGENITAPFLQPVTLQCIGDGVPTPSLRWWKDGVALAAFGGNLQIEKVDLRDEGIYTCAATNLAGESKREVALKVLVPPNIEPGPVNKAVLENASVTLECLASGVPPPDVSWFKGHQPVSSWMGVTVSVDGRVLRIEQAQLSDAGSYRCVASNVAGSTELRYGLRVNVPPRITLPPSLPGPVLVNTPVRLTCNATGAPSPTLMWLKDGNPVSPAGTPGLQVFPGGRVLTLASARASDSGRYSCVAVSAVGEDRQDVVLQVHMPPSILGEELNVSVVANESVALECQSHAMPPPVLSWWKDGRPLEPRPGVHLSADKALLQVDRADVWDAGHYTCEALNQAGHSEKHYNLNVWVAPVFPLRESHTLTVREGHPTRLSCECRGVPFPKISWRKDGQPLPGEGAGLQHVSAVGRLLYLGQAQLAQEGTYTCECSNVVGNSSQDLQLEVHVPPQIAGPREPPTQVSVVQDGVATLECNATGKPPPTVTWERDGQPVGAELGLQLQNQGQSLHVERAQAAHTGRYSCVAENLAGRAERKFELSVLVPPELIGDLDPLTNITAALHSPLTLLCEAMGIPPPAIRWFRGEEPVSPGEDTYLLAGGWMLKMTQTQEQDSGLYSCLASNEAGEARRNFSVEVLVPPSIENEDLEEVIKVLDGQTAHLMCNVTGHPQPKLTWFKDGRPLARGDAHHISPDGVLLQVLQANLSSAGHYSCIAANAVGEKTKHFQLSVLLAPTILGGAEDSADEEVTVTVNNPISLICEALAFPSPNITWMKDGAPFEASRNIQLLPGTHGLQILNAQKEDAGQYTCVVTNELGEAVKNYHVEVLIPPSISKDDPLAEVGVKEVKTKVNSTLTLECESWAVPPPTIRWYKDGQPVTPSSRLQVLGEGRLLQIQPTQVSDSGRYLCVATNVAGEDDQDFNVLIQVPPMFQKVGDFSAAFEILSREEEARGGVTEYREIVENNPAYLYCDTNAIPPPDLTWYREDQPLSAGDEVSVLQGGRVLQIPLVRAENAGRYSCKASNEVGEDWLHYELLVLTPPVILGDTEELVEEVTVNASSTVSLQCPALGNPVPTISWLQNGLPFSPSPRLQVLEDGQVLQVSTAEVADAASYMCVAENQAGSAEKLFTLRVQVPPRIAGLDLEQVTAILNSSVSLPCDVHAHPNPEVTWYKDSQALSLGEEVFLLPGTHTLQLGRARLSDSGMYTCEALNAAGRDQKLVQLSVLVPPAFRQAPRGPQDAVLVRVGDKAVLSCETDALPEPTVTWYKDGQPLVLAQRTQALRGGQRLEIQEAQVSDKGLYSCKVSNVAGEAVRTFTLTVQVPPTFENPKTETVSQVAGSPLVLTCDVSGVPAPTVTWLKDRMPVESSAVHGVVSRGGRLQLSRLQPAQAGTYTCVAENTQAEARKDFVVAVLVAPRIRSSGVAREHHVLEGQEVRLDCEADGQPPPDVAWLKDGSPLGQDMGPHLRFYLDGGSLVLKGLRASDAGAYTCVAHNPAGEDARLHTVNVLVPPTIKQGADGSGTLVSRPGELVTMVCPVRGSPPIHVSWLKDGLPLPLSQRTLLHGSGHTLRISKVQLADAGIFTCVAASPAGVADRNFTLQVQVPPVLEPVEFQNDVVVVRGSLVELPCEARGVPLPLVSWMKDGEPLLSQSLEQGPSLQLEAVGAGDSGTYSCVAVSEAGEARRHFQLTVMEPPHIEDSGQPTELSLTPGAPMELLCDAQGTPQPNITWHKDGQALTRLENNSRATRVLRVENVQVRDAGLYTCLAESPAGAIEKSFRVRVQAPPNIVGPRGPRFVVGLAPGQLVLECSVEAEPAPKITWHRDGIVLQEDAHTQFPERGRFLQLQALSTADSGDYSCTARNAAGSTSVAFRVEIHTVPTIRSGPPAVNVSVNQTALLPCQADGVPAPLVSWRKDRVPLDPRSPRFEILPEGSLRIQPVLAQDAGHYLCLASNSAGSDRQGRDLRVLALLPCEASGSPKPLVVWWKDGQKLDFRLQQGAYRLLPSNALLLTAPGPQDSAQFECVVSNEVGEAHRLYQVTVHVPPTIADDQTDFTVTMMAPVVLTCHSTGIPAPTVSWSKAGAQLGARGSGYRVSPSGALEIGQALPIHAGRYTCSARNSAGVAHKHVFLTVQASPVVKPLPSVVRAVAEEEVLLPCEASGIPRPTITWQKEGLNVATGVSTQVLPGGQLRIAHASPEDAGNYLCIAKNSAGSAMGKTRLVVQVPPVIENGLPDLSTTEGSHAFLPCKARGSPEPNITWDKDGQPVSGAEGKFTIQPSGELLVKNLEGQDAGTYTCTAENAVGRARRRVHLTILVLPVFTTLPGDRSLRLGDRLWLRCAARGSPTPRIGWTVNDRPVTEGVSEQDGGSTLQRAAVSREDSGTYVCWAENRVGRTQAVSFVHVKEAPVLQGEAFSYLVEPVGGSIQLDCVVRGDPVPDIHWIKDGLPLRGSHLRHQLQNGSLTIRRTERDDAGRYQCLAENEMGVAKKVVILVLQSAPVFQVEPQDMTVRSGDDVALRCQATGEPTPTIEWLQAGQPLRASRRLRTLPDGSLWLENVETGDAGTYDCVAHNLLGSATARAFLVVRGEPQGSWGSMTGVINGRKFGVATLNTSVMQEAHSGVSSIHSSIRHVPANVGPLMRVLVVTIAPIYWALARESGEALNGHSLTGGRFRQESHVEFATGELLTMTQVARGLDPDGLLLLDVVVNGVVPESLADADLQVQDFEEHYVQTGPGQLFVGSTQRFFQGGLPSFLRCNHSIQYNAARGPQPQLVQHLRASAISSAFDPEAEALRFQLATALQAEENEVGCPEGFELDSQGAFCVDRDECSGGPSPCSHACLNAPGRFSCTCPTGFALAWDDRNCRDVDECAWDAHLCREGQRCVNLLGSYRCLPDCGPGFRVADGAGCEDVDECLEGLDDCHYNQLCENTPGGHRCSCPRGYRMQGPSLPCLDVNECLQLPKACAYQCHNLQGSYRCLCPPGQTLLRDGKACTSLERNGQNVTTVSHRGPLLPWLRPWASIPGTSYHAWVSLRPGPMALSSVGRAWCPPGFIRQNGVCTDLDECRVRNLCQHACRNTEGSYQCLCPAGYRLLPSGKNCQDINECEEESIECGPGQMCFNTRGSYQCVDTPCPATYRQGPSPGTCFRRCSQDCGTGGPSTLQYRLLPLPLGVRAHHDVARLTAFSEVGVPANRTELSMLEPDPRSPFALRPLRAGLGAVYTRRALTRAGLYRLTVRAAAPRHQSVFVLLIAVSPYPY

SEQ ID NO: 3829 - protein, 503 aa, Homo sapiens
MAETSLLEAGASAASTAAALENLQVEASCSVCLEYLKEPVIIECGHNFCKACITRWWEDLERDFPCPVCRKTSRYRSLRPNRQLGSMVEIAKQLQAVKRKIRDESLCPQHHEALSLFCYEDQEAVCLICAISHTHRAHTVVPLDDATQEYKEKLQKCLEPLEQKLQEITRCKSSEEKKPGELKRLVESRRQQILREFEELHRRLDEEQQVLLSRLEEEEQDILQRLRENAAHLGDKRRDLAHLAAEVEGKCLQSGFEMLKDVKSTLEKCEKVKTMEVTSVSIELEKNFSNFPRQYFALRKILKQLIADVTLDPETAHPNLVLSEDRKSVKFVETRLRDLPDTPRRFTFYPCVLATEGFTSGRHYWEVEAAHCVLAQDPENQALARFYCYTERTIAKRLVLRRDPSVKRTLCRGCSSLLVPGLTCTQRQRRCRGQRWTVQTCLTCQRSQRFLNDPGHLLWGDRPEAQLGSQADSKPLQPLPNTAHSISDRLPEEKMQTQGSSNQ

SEQ ID NO: 3830 - protein, 59 aa, Homo sapiens
METPLDVLSRAASLVHADDEKREAALRGEPRIQTLPVASALSSHRTGPPPISPSKRKFS

SEQ ID NO: 3831 - protein, 420 aa, Homo sapiens
MDEQPRLMHSHAGVGMAGHPGLSQHLQDGAGGTEGEGGRKQDIGDILQQIMTITDQSLDEAQARKHALNCHRMKPALFNVLCEIKEKTVLSIRGAQEEEPTDPQLMRLDNMLLAEGVAGPEKGGGSAAAAAAAAASGGAGSDNSVEHSDYRAKLSQIRQIYHTELEKYEQACNEFTTHVMNLLREQSRTRPISPKEIERMVSIIHRKFSSIQMQLKQSTCEAVMILRSRFLDARRKRRNFNKQATEILNEYFYSHLSNPYPSEEAKEELAKKCGITVSQVSNWFGNKRIRYKKNIGKFQEEANIYAAKTAVTATNVSAHGSQANSPSTPNSAGSSSSFNMSNSGDLFMSVQSLNGDSYQGAQVGANVQSQVDTLRHVISQTGGYSDGLAASQMYSPQGISHLPRHPRQAHYHFRLPTWHP

SEQ ID NO: 3832 - protein, 559 aa, Homo sapiens
MQHVLCNHPPWIFTCLCAEGNIQPGDPGPGDQEKQQQASEGRPWSDQAEGPEGEGAMPLFGRTKKRTLGAFSRPPQRQPVSSRNGLRGVELEASPAQSGNPEETDKLLKRIEVLGFGTVNCGECGLSFSKMTNLLSHQRIHSGEKPYVCGVCEKGFSLKKSLARHQKAHSGEKPIVCRECGRGFNRKSTLIIHERTHSGEKPYMCSECGRGFSQKSNLIIHQRTHSGEKPYVCRECGKGFSQKSAVVRHQRTHLEEKTIVCSDCGLGFSDRSNLISHQRTHSGEKPYACKECGRCFRQRTTLVNHQRTHSKEKPYVCGVCGHSFSQNSTLISHRRTHTGEKPYVCGVCGRGFSLKSHLNRHQNIHSGEKPIVCKDCGRGFSQQSNLIRHQRTHSGEKPMVCGECGRGFSQKSNLVAHQRTHSGERPYVCRECGRGFSHQAGLIRHKRKHSREKPYMCRQCGLGFGNKSALITHKRAHSEEKPCVCRECGQGFLQKSHLTLHQMTHTGEKPYVCKTCGRGFSLKSHLSRHRKTTSVHHRLPVQPDPEPCAGQPSDSLYSL

SEQ ID NO: 3833 - protein, 923 aa, Homo sapiens
MCIPPPNVTGSLHIGHALTVAIQDALVRWHRMRGDQVLWVPGSDHAGIATQAVVEKQLWKERGVRRHELSREAFLREVWQWKEAKGGEICEQLRALGASLDWDRECFTMDVGSSVAVTEAFVRLYKAGLLYRNHQLVNWSCALRSAISDIEVENRPLPGHTQLRLPGCPTPVSFGLLFSVAFPVDGEPDAEVVVGTTRPETLPGDVAVAVHPDDSRYTHLHGRQLRHPLMGQPLPLITDYAVQPHVGTGAVKVTPAHSPADAEMGARHGLSPLNVIAEDGTMTSLCGDWLQGLHRFVAREKIMSVLSEWGLFRGLQNHPMVLPICSRSGDVIEYLLKNQWFVRCQEMGARAAKAVESGALELSPSFHQKNWQHWFSHIGDWCVSRQLWWGHQIPAYLVVEDHAQGEEDCWVVGRSEAEAREVAAELTGRPGAELTLERDPDVLDTWFSSALFPFSALGWPQETPDLARFYPLSLLETGSDLLLFWVGRMVMLGTQLTGQLPFSKVLLHPMVRDRQGRKMSKSLGNVLDPRDIISGVEMQVLQEKLRSGNLDPAELAIVAAAQKKDFPHGIPECGTDALRFTLCSHGVQAGDLHLSVSEVQSCRHFCNKIWNALRFILNALGEKFVPQPAEELSPSSPMDAWILSRLALAAQECERGFLTRELSLVTHALHHFWLHNLCDVYLEAVKPVLWHSPRPLGPPQVLFSCADLGLRLLAPLMPFLAEELWQRLPPRPGCPPAPSISVAPYPSACSLEHWRQPELERRFSRVQEVVQVLRALRATYQLTKARPRVLLQSSEPGDQGLFEAFLEPLGTLGYCGAVGLLPPGAAAPSGWAQAPLSDTAQVYMELQGLVDPQIQLPLLAARRYKLQKQLDSLTARTPSEGEAGTQRQQKLSSLQLELSKLDKAASHLRQLMDEPPAPGSPEL

SEQ ID NO: 3834 - protein, 527 aa, Homo sapiens
MVRPGYSHRVSLPTSPGILATSPYPETDSAFFEPSHLTSAADEGAVQVSRRTISSNSFSPEVFVLPVDVEKENAHFYVADMIISAMEKMKCNILSQQQTESWSKEVSGLLGSDQPDSEMTFDTNIKQESGSSTSSYSGYEGCAVLQVSPVTETRTYHDVKEICKCDVDEFVILELGDFNDITETCSCSCSSSKSVTYEPDFNSAELLAKELYRVFQKCWILSVVNSQLAGSLSAAGSIVVNEECVRKDFESSMNVVQEIKFKSRIRGTEDWAPPRFQIIFNIHPPLKRDLVVAAQNFFCAGCGTPVEPKFVKRLRYCEYLGKYFCDCCHSYAESCIPARILMMWDFKKYYVSNFSKQLLDSIWHQPIFNLLSIGQSLYAKAKELDRVKEIQEQLFHIKKLLKTCRFANSALKEFEQVPGHLTDELHLFSLEDLVRIKKGLLAPLLKDILKASLAHVAGCELCQGKGFICEFCQNTTVIFPFQTATCRRCSACRACFHKQCFQSSECPRCARITARRKLLESVASAAT

SEQ ID NO: 3835 - protein, 562 aa, Homo sapiens
MNFPGLFKIVADKTPYLTMEEITRTIHIGPSRLGHPCFYHQKDIKLENLIIKQGEQIMLNSVEEIDGEIMVSCAVARNHQTHSFNLPLSQEGEFYECEDERIYTLKEIVEWKIPKNRTRTVNLTDFSNKWDSTNPFPKDFYGTLILKPVYEIQGVMKFRKDIIRILPSLDVEVKDITDSYDANWFLQLLSTEDLFEMTSKEFPIVTEVIEAPEGNHLPQSILQPGKTIVIHKKYQASRILASEIRSNFPKRHFLIPTSYKGKFKRRPREFPTAYDLEIAKSEKEPLHVVATKAFHSPHDKLSSVSVGDQFLVHQSETTEVLCEGIKKVVNVLACEKILKKSYEAALLPLYMEGGFVEVIHDKKQYPISELCKQFRLPFNVKVSVRDLSIEEDVLAATPGLQLEEDITDSYLLISDFANPTECWEIPVGRLNMTVQLVSNFSRDAEPFLVRTLVEEITEEQYYMMRRYESSASHPPPRPPKHPSVEETKLTLLTLAEERTVDLPKSPKRHHVDITKKLHPNQAGLDSKVLIGSQNDLVDEEKERSNRGATAIAETFKNEKHQK

SEQ ID NO: 3836 - protein, 383 aa, Homo sapiens
MEGSSSYEVPSVAAADLEEGAGQTRSLPATPSKDVHKGVGGIIFSSSPILDLSESGLCRLEEVFRIPSLQQLHLQRNALCVIPQDFFQLLPNLTWLDLRYNRIKALPSGIGAHQHLKTLLLERNPIKMLPVELGSVTTLKALNLRHCPLEFPPQLVVQKGLVAIQRFLRMWAVEHSLPRNPTSQEAPPVREMTLRDLPSPGLELSGDHASNQGAVNAQDPEGAVMKEKASFLPPVEKPDLSELRKSADSSENWPSEEEIRRFWKLRQEIVEHVKADVLGDQLLTRELPPNLKAALNIEKELPKPRHVFRRKTASSRSILPDLLSPYQMAIRAKRLEESRAAALRELQEKQALMEQQRRPFLLIFPRVFQALTRSSGRFILVLL

SEQ ID NO: 3837 - protein, 638 aa, Homo sapiens
MGEIEGTYRVLQTAGMRLGAQTPVGVSTLEPGQTLLPRMQEKHLHLRVKLLDNTMEIFDIEPKCDGQVLLTQVWKRLNLVECDYFGMEFQNTQSYWIWLEPMKPIIRQIRRPKNVVLRLAVKFFPPDPGQLQEEYTRYLFALQLKRDLLEERLTCADTTAALLTSHLLQSEIGDYDETLDREHLKVNEYLPGQQHCLEKILEFHQKHVGQTPAESDFQVLEIARKLEMYGIRFHMASDREGTKIQLAVSHMGVLVFQGTTKINTFNWSKVRKLSFKRKRFLIKLHPEVHGPYQDTLEFLLGSRDECKNFWKICVEYHTFFRLLDQPKPKAKAVFFSRGSSFRYSGRTQKQLVDYFKDSGMKRIPYERRHSKTHTSVRALTADLPKQSISFPEGLRTPASPSSANAFYSLSPSTLVPSGLPEFKDSSSSLTDPQVSYVKSPAAERRSGAVAGGPDTPSAQPLGPPALQPGPGLSTKSPQPSPSSRKSPLSLSPAFQVPLGPAEQGSSPLLSPVLSDAGGAGMDCEEPRHKRVPADEAYFIVKEILATERTYLKDLEVITVWFRSAVVKEDAMPATLMTLLFSNIDPIYEFHRGFLREVEQRLALWEGPSKAHTKGSHQRIGDILLRNMRQLKAAHEFTT

SEQ ID NO: 3838 - protein, 135 aa, Homo sapiens
MPSDFISLLSADLDLESPKSLYSRESVYDLLPKELQLPPSRETSVASMSQTSGGEAGSPPPAVVAADASSAPSSSSMGGACSSFTTSSSPTIYSTSVTDSKAMQVESCSSAVGNIGKPKRNWSKEEPYVVWTISC

SEQ ID NO: 3839 - protein, 176 aa, Homo sapiens
MVIKLKDGGKAAQANVRIGDVVLSIDGINAQGMTHLEAQNKIKGCTGSLNMTLQRASAAPKPEPVPVQKGEPKEVVKPVPITSPAVSKVTSTNNMAYNKAPRPFGSVSSPKVTSIPSPSSAFTPAHATTSSHASPSPVAAVTPPLFAASGLHANANLSADQSPSALSAGKTAVNVP

SEQ ID NO: 3840 - protein, 339 aa, Homo sapiens
MDSPGYNCFVDKDKMDAAIQDLGPKELSCTELQELKQLARQGYWAQSHALRGKVYQRLIRDIPCRTVTPDASVYSDIVGKIVGKHSSSCLPLPEFVDNTQVPSYCLNARGEGAVRKILLCLANQFPDISFCPALPAVVALLLHYSIDEAECFEKACRILACNDPGRRLIDQSFLAFESSCMTFGDLVNKYCQAAHKLMVAVSEDVLQVYADWQRWLFGELPLCYFARVFDVFLVEGYKVLYRVALAILKFFHKVRAGQPLESDSVKQDIRTFVRDIAKTVSPEKLLEKAFAIRLFSRKEIQLLQMANEKALKQKGITVKQKSLYTWPSMQRTSARRSSA

SEQ ID NO: 3841 - protein, 150 aa, Homo sapiens
MWDNISCWPSSVPGRMVEVECPRFLRMLTSRNGSLFRNCTQDGWSETFPRPNLACGVNVNDSSNEKRHSYLLKLKVMYTVGYSSSLVMLLVALGILCAFRRLHCTRNYIHMHLFVSFILRALSNFIKDAVLFSSDDVTYCDAHRAGCKLV

SEQ ID NO: 3842 - protein, 243 aa, Homo sapiens
MPVIPALWEAEVRGSLEPKSSRPAWATWVFSPCSIMLEFPETMGFSKNQTGALPRLCDVLQVLWEEQDQCLQELSREQTGDLGTEQPVPGCEGMWDNISCWPSSVPGRMVEVECPRFLRMLTSRNGSLFRNCTQDGWSETFPRPNLACGVNVNDSSNEKRHSYLLKLKVMYTVGYSSSLVMLLVALGILCAFRRLHCTRNYIHMHLFVSFILRALSNFIKDAVLFSSDDVTYCDAHRAGCKLV

SEQ ID NO: 3843 - protein, 1233 aa, Homo sapiens
MPPSWSPLMCGRAAEAAASSRTPGREMGQAVTRRLGAGARAAPRRAMDGRTPRPQDAPARREIAGSWRKPKAKAPLPPAETKYTDVSSAADSVESTAFIMEQKENMIDKDVELSVVLPGDIIKSTTVHGSKPMMDLLIFLCAQYHLNPSSYTIDLLSAEQNHIKFKPNTPIGMLEVEKVILKPKMLDKKKPTPIIPEKTVRVVINFKKTQKTIVRVSPHASLQELAPIICSKCEFDPLHTLLLKDYQSQEPLDLTKSLNDLGLRELYAMDVNRATSVTVFSKSSLQESCQISQNLDIMKEKENKGFFSFFQRSKKKRDQTASAPATPLVNKHRPTFTRSNTISKPYISNTLPSDAPKKRRAPLPPMPASQSVPQDLAHIQERPASCIVKSMSVDETDKSPCEAGRVRAGSLQLSSMSAGNSSLRRTKRKAPSPPSKIPPHQSDENSRVTALQPVDGVPPDSASEANSPEELSSPETFHPGLSSQEQCTAPKLMEETSVFECPGTPEAAITSLTSGISSDYSLEEIDEKEELSEVPKVEAENISPKSQDIPFVSTDIINTLKNDPDSALGNGSGEFSQNSMEEKQETKSTDGQEPHSVVYDTSNGKKVVDSIRNLKSLGPNQENVVQNEIIVYPENTEDNMKNGVKKTEINVEGVAKNNNIDMEVERPSNSEAHETDTAISYKENHLAASSVPDQKLNQPSAEKTKDAAIQTTPSCNSFDGKHQDHNLSDSKVEECVQTSNNNISTQHSCLSSQDSVNTSREFRSQGTLIIHSEDPLTVKDPICAHGNDDLLPPVDRIDKNSTASYLKNYPLYRQDYNPKPKPSNEITREYIPKIGMTTYKIVPPKSLEISKDWQSETIEYKDDQDMHALGKKHTHENVKETAIQTEDSAISESPEEPLPNLKPKPNLRTEHQVPSSVSSPDDAMVSPLKPAPKMTRDTGTAPFAPNLEEINNILESKFKSRASNAQAKPSSFFLQMQKRVSGHYVTSAAAKSVHAAPNPAPKELTNKEAERDMLPSPEQTLSPLSKMPHSVPQPLVEKTDDDVIGQAPAEASPPPIAPKPVTIPASQVSTQNLKTLKTFGAPRPYSSSGPSPFALAVVKRSQSFSKERTESPSASALVQPPANTEEGKTHSVNKFVDIPQLGVSDKENNSAHNEQNSQIPTPTDGPSFTVMRQSSLTFQSSDPEQMRQSLLTAIRSGEAAAKLKRVTIPSNTISVNGRSRLSHSMSPDAQDGH

SEQ ID NO: 3844 - protein, 449 aa, Homo sapiens
MRLLAKIICLMLWAICVAEDCNELPPRRNTEILTGSWSDQTYPEGTQAIYKCRPGYRSLGNVIMVCRKGEWVALNPLRKCQKRPCGHPGDTPFGTFTLTGGNVFEYGVKAVYTCNEGYQLLGEINYRECDTDGWTNDIPICEVVKCLPVTAPENGKIVSSAMEPDREYHFGQAVRFVCNSGYKIEGDEEMHCSDDGFWSKEKPKCVEISCKSPDVINGSPISQKIIYKENERFQYKCNMGYEYSERGDAVCTESGWRPLPSCEEKSCDNPYIPNGDYSPLRIKHRTGDEITYQCRNGFYPATRGNTAKCTSTGWIPAPRCTLKPCDYPDIKHGGLYHENMRRPYFPVAVGKYYSYYCDEHFETPSGSYWDHIHCTQDGWSPAVPCLRKCYFPYLENGYNQNHGRKFVQGKSIDVACHPGYALPKAQTTVTCMENGWSPTPRCIRVSFTL

SEQ ID NO: 3845 - protein, 79 aa, Homo sapiens
MGNSYAGQLKTTRFEEVLHNSIEASLRSNNLVPRPIFSQLYLEAEQQLAALEGGSRVDNEEEEEEGEGGLETNGPPNPF

SEQ ID NO: 3846 - protein, 657 aa, Homo sapiens
MAHMAFRDVAVDFTQDEWRLLSPAQRTLYREVMLENYSNLVSLGISFSKPELITQLEQGKETWREEKKCSPATCPADPEPELYLDPFCPPGFSSQKFPMQHVLCNHPPWIFTCLCAEGNIQPGDPGPGDQEKQQQASEGRPWSDQAEGPEGEGAMPLFGRTKKRTLGAFSRPPQRQPVSSRNGLRGVELEASPAQSGNPEETDKLLKRIEVLGFGTVNCGECGLSFSKMTNLLSHQRIHSGEKPYVCGVCEKGFSLKKSLARHQKAHSGEKPIVCRECGRGFNRKSTLIIHERTHSGEKPYMCSECGRGFSQKSNLIIHQRTHSGEKPYVCRECGKGFSQKSAVVRHQRTHLEEKTIVCSDCGLGFSDRSNLISHQRTHSGEKPYACKECGRCFRQRTTLVNHQRTHSKEKPYVCGVCGHSFSQNSTLISHRRTHTGEKPYVCGVCGRGFSLKSHLNRHQNIHSGEKPIVCKDCGRGFSQQSNLIRHQRTHSGEKPMVCGECGRGFSQKSNLVAHQRTHSGERPYVCRECGRGFSHQAGLIRHKRKHSREKPYMCRQCGLGFGNKSALITHKRAHSEEKPCVCRECGQGFLQKSHLTLHQMTHTGEKPYVCKTCGRGFSLKSHLSRHRKTTSVHHRLPVQPDPEPCAGQPSDSLYSL

SEQ ID NO: 3847 - protein, 680 aa, Homo sapiens
MALSLEEFVHSLDLRTLPRVLEIQAGIYLEGSIYEMFGNECCFSTGEVIKITGLKVKKIIAEICEQIEGCESLQPFELPMNFPGLFKIVADKTPYLTMEEITRTIHIGPSRLGHPCFYHQKDIKLENLIIKQGEQIMLNSVEEIDGEIMVSCAVARNHQTHSFNLPLSQEGEFYECEDERIYTLKEIVEWKIPKNRTRTVNLTDFSNKWDSTNPFPKDFYGTLILKPVYEIQGVMKFRKDIIRILPSLDVEVKDITDSYDANWFLQLLSTEDLFEMTSKEFPIVTEVIEAPEGNHLPQSILQPGKTIVIHKKYQASRILASEIRSNFPKRHFLIPTSYKGKFKRRPREFPTAYDLEIAKSEKEPLHVVATKAFHSPHDKLSSVSVGDQFLVHQSETTEVLCEGIKKVVNVLACEKILKKSYEAALLPLYMEGGFVEVIHDKKQYPISELCKQFRLPFNVKVSVRDLSIEEDVLAATPGLQLEEDITDSYLLISDFANPTECWEIPVGRLNMTVQLVSNFSRDAEPFLVRTLVEEITEEQYYMMRRYESSASHPPPRPPKHPSVEETKLTLLTLAEERTVDLPKSPKAGVQWRDLGSLQPLPPGFKQFSASASHVAGITGTPHHVQRHHVDITKKLHPNQAGLDSKVLIGSQNDLVDEEKERSNRGATAIAETFKNEKHQK

SEQ ID NO: 3848 - protein, 308 aa, Homo sapiens
MLELSAPELEPPKAALSPSQVEVPEDEEDYTGVCHPECGDKGCDGPNADQCLNCVHFSLGSVKTSRKCVSVCPLGYFGDTAARRCRRCHKGCETCSSRAATQCLSCRRGFYHHQEMNTCVTLCPAGFYADESQKNCLKCHPSCKKCVDEPEKCTVCKEGFSLARGSCIPDCEPGTYFDSELIRCGECHHTCGTCVGPGREECIHCAKNFHFHDWKCVPACGEGFYPEEMPGLPHKVCRRCDENCLSCAGSSRNCSRCKTGFTQLGTSCITNHTCSNADETFCEMVKSNRLCERKLFIQFCCRTCLLAG

SEQ ID NO: 3849 - protein, 216 aa, Homo sapiens
MNPASDGGTSESIFDLDYASWGIRSTLMVAGFVFYLGVFVVCHQLSSSLNATYRSLVAREKVFWDLAATRAVFGVQSTAAGLWALLGDPVLHADKARGQQNWCWFHITTATGFFCFENVAVHLSNLIFRTFDLFLVIHHLFAFLGFLGCLVNLQAGHYLAMTTLLLEMSTPFTCVSWMLLKETGSLERKNKHNKSLLPSGSRRAGPSLCFGSSTSG

SEQ ID NO: 3850 - protein, 55 aa, Homo sapiens
MVHLTPEEKSAVTALWGKVNVDEVGGCWWSTLGPRGSLSPLGICPLLMLLWATLR

SEQ ID NO: 3851 - protein, 2131 aa, Homo sapiens
MPLSPPAQGDPGEPSPCRPPKKHTTFHLWRSKKKQQPAPPDCGVFVPHPLPAPAGEARALDVVDGKYVVRDSQEFPLHCGESQFFHTTSEALGSLLLESGIFKKSRAQPPEDNRRKPVLGKLGTLFTAGRRRNSRNGLESPTRSNAKPLSPKDVVASPKLPERESERSRSQSSQLKQTDTSEEGSPRENPREAEGELPESGGPAAPPDAELSPRWSSSAAAVAVQQCHENDSPQLEPLEAEGEPFPDATTTAKQLHSSPGNSSRQENAETPARSPGEDASPGAGHEQEAFLGVRGAPGSPTQERPAGGLGEAPNGAPSVCAEEGSLGPRNARSQPPKGASDLPGEPPAEGAAHTASSAQADCTARPKGHAHPAKVLTLDIYLSKTEGAQVDEPVVITPRAEDCGDWDDMEKRSSGRRSGRRRGSQKSTDSPGADAELPESAARDDAVFDDEVAPNAASDNASAEKKVKSPRAALDGGVASAASPESKPSPGTKGQLRGESDRSKQPPPASSPTKRKGRSRALEAVPAPPASGPRAPAKESPPKRVPDPSPVTKGTAAESGEEAARAIPRELPVKSSSLLPEIKPEHKRGPLPNHFNGRAEGGRSRELGRAAGAPGASDADGLKPRNHFGVGRSTVTTKVTLPAKPKHVELNLKTPKNLDSLGNEHNPFSQPVHKGNTATKISLFENKRTNSSPRHTDIRGQRNTPASSKTFVGRAKLNLAKKAKEMEQPEKKVMPNSPQNGVLVKETAIETKVTVSEEEILPATRGMNGDSSENQALGPQPNQDDKADVQTDAGCLSEPVASALIPVKDHKLLEKEDSEAADSKSLVLENVTDTAQDIPTTVDTKDLPPTAMPKPQHTFSDSQSPAESSPGPSLSLSAPAPGDVPKDTCVQSPISSFPCTDLKVSENHKGCVLPVSRQNNEKMPLLELGGETTPPLSTERSPEAVGSECPSRVLVQVRSFVLPVESTQDVSSQVIPESSEVREVQLPTCHSNEPEVVSVASCAPPQEEVLGNEHSHCTAELAAKSGPQVIPPASEKTLPIQAQSQGSRTPLMAESSPTNSPSSGNHLATPQRPDQTVTNGQDSPASLLNISAGSDDSVFDSSSDMEKFTEIIKQMDSAVCMPMKRKKARMPNSPAPHFAMPPIHEDHLEKVFDPKVFTFGLGKKKESQPEMSPALHLMQNLDTKSKLRPKRASAEQSVLFKSLHTNTNGNSEPLVMPEINDKENRDVTNGGIKRSRLEKSALFSSLLSSLPQDKIFSPSVTSVNTMTTAFSTSQNGSLSQSSVSQPTTEGAPPCGLNKEQSNLLPDNSLKVFNFNSSSTSHSSLKSPSHMEKYPQKEKTKEDLDSRSNLHLPETKFSELSKLKNDDMEKANHIESVIKSNLPNCANSDTDFMGLFKSSRYDPSISFSGMSLSDTMTLRGSVQNKLNPRPGKVVIYSEPDVSEKCIEVFSDIQDCSSWSLSPVILIKVVRGCWILYEQPNFEGHSIPLEEGELELSGLWGIEDILERHEEAESDKPVVIGSIRHVVQDYRVSHIDLFTEPEGLGILSSYFDDTEEMQGFGVMQKTCSMKVHWGTWLIYEEPGFQGVPFILEPGEYPDLSFWDTEEAYIGSMRPLKMGGRKVEFPTDPKVVVYEKPFFEGKCVELETGMCSFVMEGGETEEATGDDHLPFTSVGSMKVLRGIWVAYEKPGFTGHQYLLEEGEYRDWKAWGGYNGELQSLRPILGDFSNAHMIMYSEKNFGSKGSSIDVLGIVANLKETGYGVKTQSINVLSGVWVAYENPDFTGEQYILDKGFYTSFEDWGGKNCKISSVQPICLDSFTGPRRRNQIHLFSEPQFQGHSQSFEETTSQIDDSFSTKSCRVSGGSWVVYDGENFTGNQYVLEEGHYPCLSAMGCPPGATFKSLRFIDVEFSEPTIILFEREDFKGKKIELNAETVNLRSLGFNTQIRSVQVIGGIWVTYEYGSYRGRQFLLSPAEVPNWYEFSGCRQIGSLRPFVQKRIYFRLRNKATGLFMSTNGNLEDLKLLRIQVMEDVGADDQIWIYQEGCIKCRIAEDCCLTIVGSLVTSGSKLGLALDQNADSQFWSLKSDGRIYSKLKPNLVLDIKGGTQYDQNHIILNTVSKEKFTQVWEAMVLYT

SEQ ID NO: 3852 - protein, 246 aa, Homo sapiens
MNLLLILTFVAAAVAAPFDDDDKIVGGYICEENSVPYQVSLNSGYHFCGGSLISEQWVVSAGHCYKSAINSKLSGRGCEYHRIQVRLGEHNIEVLEGNEQFINAAKIIRHPKYNSRTLDNDILLIKLSSPAVINSRESLISGWGNTLSSGADYPDELQCLDAPVLSQAECEASYPGKITNNMFCVGFLEGGKDSCQGDSGGPVVSNGELQGIVSWGYGCAQKNRPGVYTKVYNYVDWIKDTIAANS

SEQ ID NO: 3853 - protein, 118 aa, Homo sapiens
MTFGQSKLYRSEDYGKNFKDITDLINNTFIRTEFGMAIGPENSGKVVLTAEVSGGSRGGRIFRSSDFAKNFVQTDLPFHPLTQMMYSPQNSDYLLALSTENGLWVSKNFGGKWEEIHK

SEQ ID NO: 3854 - protein, 247 aa, Homo sapiens
MNLLLILTFVAAAVAAPFDDDDKIVGGYICEENSVPYQVSLNSGYHFCGGSLISEQWVVSAGHCYKSRIQVRLGEHNIEVLEGNEQFINAAKIIRHPKYNSRTLDNDILLIKLSSPAVINSRVSAISLPTAPPAAGTESLISGWGNTLSSGADYPDELQCLDAPVLSQAECEASYPGKITNNMFCVGFLEGGKDSCQGDSGGPVVSNGELQGIVSWGYGCAQKNRPGVYTKVYNYVDWIKDTIAANS

SEQ ID NO: 3855 - protein, 261 aa, Homo sapiens
MNLLLILTFVAAAVAAPFDDDDKIVGGYICEENSVPYQVSLNSGYHFCGGSLISEQWVVSAGHCYKSAINSKLSGRGCEYHRIQVRLGEHNIEVLEGNEQFINAAKIIRHPKYNSRTLDNDILLIKLSSPAVINSRVSAISLPTAPPAAGTESLISGWGNTLSSGADYPDELQCLDAPVLSQAECEASYPGKITNNMFCVGFLEGGKDSCQGDSGGPVVSNGELQGIVSWGYGCAQKNRPGVYTKVYNYVDWIKDTIAANS

SEQ ID NO: 3856 - protein, 129 aa, Homo sapiens
KPTPFSRACWQILPHLSAGVPLLGWEHPVQGKSFQATNCCPQGNGVRKIPPWQPPGACAGGAQDPPPEYDSPERPTELTSNSFNFQNRLCRIFHEGTHEGEIASSEVQSRKCIAAGNPHSSAQTLTKSQ

SEQ ID NO: 3857 - protein, 247 aa, Homo sapiens
MNPLLILAFVGAAVAAPFDDDDKIVGGYICEENSVPYQVSLNSGYHFCGGSLISEQWVVSAGHCYKSRIQVRLGEHNIEVLEGNEQFINAAKIIRHPKYNSRTLDNDILLIKLSSPAVINSRVSAISLPTAPPAAGTESLISGWGNTLSSGADYPDELQCLDAPVLSQAECEASYPGKITNNMFCVGFLEGGKDSCQGDSGGPVVSNGELQGIVSWGYGCAQKNRPGVYTKVYNYVDWIKDTIAANS

SEQ ID NO: 3858 - protein, 714 aa, Homo sapiens
MAYYGKCIETVIEQLDKFTPKRDNPEQFLEAAATSLQALSPQKQSFVLEVLSGCLEYRKLLTVVVDAFYVEDGRLCLRVDHSRFEVICYLATFLLEELGFQLFCNIIKSQPVDKMCKFLRFFFNPLHLCSWIKDEWSLIYEPAHVKENWIDPLMRWQPEVQELINHLEGVSASQSSPLKTKAKVTEPKEFNLTAPRPRTIPAPEPVPVVAKPRPVPQSTYQPPKEQQQLETVKRYNRRKAEELLLRANIEELRCAMPRSCRERVQGSKQQLRLQFPPRIRKTPKLTFYRPDNILVKLNTTAILREGALYQRQVEQELQRVDKLVDGAGDFSEFFEWQKKMQAKDREEQLAASECRRLQGKLSHEEAVLARQSLMQENKQRVEQQKEQMAKLMLQRAERRLREDRSRKELVEQVIEGQKNAKAAQTKLAKGRQQTVQEAIEESRGLLQRRAQAAQEEQRRRCELISQLRALETQPTRKGKLVDLTQIPGYGLEGEMSIVELRERLALLKENQRRKEEEKRDQIIQGKHTKSQELQNMVEQISLCRAAMGRSAALRWEEKKALAAAPAAPSQDERVQQLRRRISERAAERSRQAALLHVSAPRTARPKPRVSPDWWEEPGRLKAGAGWGWRARRAGTGVPGRGWRGDRVRSAAGRYAAAGAGGGGGVPARADAFPGLQAQLEAQHWLELERSRERRLQALQQGGSGPGPARRLEAA

SEQ ID NO: 3859 - protein, 410 aa, Homo sapiens
MDDLMLSPDDIEQWFTEDPGPDEAPRMPEAAPPVAPAPAAPTPAAPAPAPSWPLSSSVPSQKTYQGSYGFRLGFLHSGTAKSVTCTYSPALNKMFCQLAKTCPVQLWVDSTPPPGTRVRAMAIYKQSQHMTEVVRRCPHHERCSDSDGLAPPQHLIRVEGNLRVEYLDDRNTFRHSVVVPYEPPEVGSDCTTIHYNYMCNSSCMGGMNRRPILTIITLEDSSGNLLGRNSFEVRVCACPGRDRRTEEENLRKKGEPHHELPPGSTKRALPNNTSSSPQPKKKPLDGEYFTLQIRGRERFEMFRELNEALELKDAQAGKEPGGSRAHSRECQTLSPGDPDPPLSETFNLNICPYPAGKLELLKLSPCPCLCRQVTLMSFLFFFLIFFYFRLYWGIIDPPKLHTFKVCSVMI

SEQ ID NO: 3860 - protein, 2509 aa, Homo sapiens
MEEVVIAGMSGKLPESENLQEFWDNLIGGVDMVTDDDRRWKAGLYGLPRRSGKLKDLSRFDASFFGVHPKQAHTMDPQLRLLLEVTYEAIVDGGINPDSLRGTHTGVWVGVSGSETSEALSRDPETLVGYSMVGCQRAMMANRLSFFFDFRGPSIALDTACSSSLMALQNAYQAIHSGQCPAAIVGGINVLLKPNTSVQFLRLGMLSPEGTCKAFDTAGNGYCRSEGVVAVLLTKKSLARRVYATILNAGTNTDGFKEQGVTFPSGDIQEQLIRSLYQSAGVAPESFEYIEAHGTGTKVGDPQELNGITRALCATRQEPLLIGSTKSNMGHPEPASGLAALAKVLLSLEHGLWAPNLHFHSPNPEIPALLDGRLQVVDQPLPVRGGNVGINSFGFGGSNVHIILRPNTQPPPAPAPHATLPRLLRASGRTPEAVQKLLEQGLRHSQDLAFLSMLNDIAAVPATAMPFRGYAVLGGERGGPEVQQVPAGERPLWFICSGMGTQWRGMGLSLMRLDRFRDSILRSDEAVKPFGLKVSQLLLSTDESTFDDIVHSFVSLTAIQIGLIDLLSCMGLRPDGIVGHSLGEVACGYADGCLSQEEAVLAAYWRGQCIKEAHLPPGAMAAVGLSWEECKQRCPPGVVPACHNSKDTVTISGPQAPVFEFVEQLRKEGVFAKEVRTGGMAFHSYFMEAIAPPLLQELKKVIREPKPRSARWLSTSIPEAQWHSSLARTSSAEYNVNNLVSPVLFQEALWHVPEHAVVLEIAPHALLQAVLKRGLKPSCTIIPLMKKDHRDNLEFFLAGIGRLHLSGIDANPNALFPPVEFPAPRGTPLISPLIKWDHSLAWDVPAAEDFPNGSGSPSAAIYNIDTSSESPDHYLVDHTLDGRVLFPATGYLSIVWKTLARALGLGVEQLPVVFEDVVLHQATILPKTGTVSLEVRLLEASRAFEVSENGNLVVSGKVYQWDDPDPRLFDHPESPTPNPTEPLFLAQAEVYKELRLRGYDYGPHFQGILEASLEGDSGRLLWKDNWVSFMDTMLQMSILGSAKHGLYLPTRVTAIHIDPATHRQKLYTLQDKAQVADVVVSRWLRVTVAGGVHISGLHTESAPRRQQEQQVPILEKFCFTPHTEEGCLSERAALQEELQLCKGLVQALQTKVTQQGLKMVVPGLDGAQIPRDPSQQELPRLLSAACRLQLNGNLQLELAQVLAQERPKLPEDPLLSGLLDSPALKACLDTAVENMPSLKMKVVLAGHGHLYSRIPGLLSPHPLLQLSYTATDRHPQALEAAQAELQQHDVAQGQWDPADPAPSALGSADLLVCNCAVAALGDPASALSNMVAALREGGFLLLHTLLRGHPLGDIVAFLTSTEPQYGQGILSQDAWESLFSRVSLRLVGLKKSFYGSTLFLCRRPTPQDSPIFLPVDDTSFRWVESLKGILADEDSSRPVWLKAINCATSGVVGLVNCLRREPGGNRLRCVLLSNLSSTSHVPEVDPGSAELQKVLQGDLVMNVYRDGAWGAFRHFLLEEDKPEEPTAHAFVSTLTRGDLSSIRWVCSSLRHAQPTCPGAQLCTVYYASLNFRDIMLATGKLSPDAIPGKWTSQDSLLGMEFSGRDASGKRVMGLVPAKGLATSVLLSPDFLWDVPSNWTLEEAASVPVVYSTAYYALVVRGRVRPGETLLIHSGSGGVGQAAIAIALSLGCRVFTTVGSAEKRAYLQARFPQLDSTSFANSRDTSFEQHVLWHTGGKGVDLVLNSLAEEKLQASVRCLATHGRFLEIGKFDLSQNHPLGMAIFLKNVTFHGVLLDAFFNESSADWREVWALVQAGIRDGVVRPLKCTVFHGAQVEDAFRYMAQGKHIGKVVVQVLAEEPEAVLKGAKPKLMSAISKTFCPAHKSYIIAGGLGGFGLELAQWLIQRGVQKLVLTSRSGIRTGYQAKQVRRWRRQGVQVQVSTSNISSLEGARGLIAEAAQLGPVGGVFNLAVVLRDGLLENQTPEFFQDVCKPKYSGTLNLDRVTREACPELDYFVVFSSVSCGRGNAGQSNYGFANSAMERICEKRRHEGLPGLAVQWGAIGDVGILVETMSTNDTIVSGTLPQRMASCLEVLDLFLNQPHMVLSSFVLAEKAAAYRDRDSQRDLVEAVAHILGIRDLAAVNLDSSLADLGLDSLMSVEVRQTLERELNLVLSVREVRQLTLRKLQELSSKADEASELACPTPKEDGLAQQQTQLNLRSLLVNPEGPTLMRLNSVQSSERPLFLVHPIEGSTTVFHSLASRLSIPTYGLQCTRAAPLDSIHSLAAYYIDCIRQVQPEGPYRVAGYSYGACVAFEMCSQLQAQQSPAPTHNSLFLFDGSPTYVLAYTQSYRAKLTPGCEAEAETEAICFFVQQFTDMEHNRVLEALLPLKGLEERVAAAVDLIIKSHQGLDRQELSFAARSFYYKLRAAEQYTPKAKYHGNVMLLRAKTGGAYGEDLGADYNLSQVCDGKVSVHVIEGDHRTLLEGSGLESIISIIHSSLAEPRVSVREG

SEQ ID NO: 3861 - protein, 1967 aa, Homo sapiens
MEKFKAAMLLGSVGDALGYRNVCKENSTVGMKIQEELQRSGGLDHLVLSPGEWPVSDNTIMHIATAEALTTDYWCLDDLYREMVRCYVEIVEKLPERRPDPATIEGCAQLKPNNYLLAWHTPFNEKGSGFGAATKAMCIGLRYWKPERLETLIEVSVECGRMTHNHPTGFLGSLCTALFVSFAAQGKPLVQWGRDMLRAVPLAEEYCRKTIRHTAEYQEHWFYFEAKWQFYLEERKISKDSENKAIFPDNYDAEEREKTYRKWSSEGRGGRRGHDAPMIAYDALLAAGNSWTELCHRAMFHGGESAATGTIAGCLFGLLYGLDLVPKGLYQDLEDKEKLEDLGAALYRLSTEENRKSSKTCSDVMSVDAQTLKKKMGKLACDPAAHSILSSLLLYVTGRADRPPGTEAGGSRPSHQPQTQEATQRPTRFQLLQAKFLGTGRERYLKRTREVGRLISKDKQGPGGGLVGATINKLLEKTKEPAPKPCLSEKPRWGHPAGKSTVKNILKIFLAAEEKEAKEKEAREKPPVERPKAARGLLPKIMGKSSVLSKLREKFEQNSCLCSEASALRLHTQERKKRNLQRKRMHRPEVRVLHTATMASTCVKMPPARFLACTAEPLPALSIATVVCGPRSWLSHCTKISHSEARRPPRGEASVPPSARETGPSGNKAVGKGPLEEEPQRQPRPSKPVTPQVMAQRDGHAVPSLAFSCAPCTGGVLPGLVPASSPLGPASPWGTGSAGGDGTADPTAESTAGGVQEVRGARLTWPPGPPGECAGEGPEITMTVCSSEDEREGAGFPDPGRDPLFATQKYFPEQKVPEHIPPLNAPSVQAARRTQPATEPPRITVQIPVVHEMPAPPTRLQNMSSGENKPCICGGENVVENAHTEFPTVTENRRGHRAPVELSKLSGMQAGLSASSPQGPRAAPRLAAARGAVGADHSVPETLLTQRLQTDPAGGKENKGSFENSHGPRNPDDISGERTSELRDVKHPLPESNEISMQKKGSATNDPAASQNLLRGNTSHASSSQQVPSPTGRNPTGAPTSLAASSKGRTGPEGVTPMGMTVPGALEECRRPLLIESSQPLKAAEEITSHDVRENPLSSLNEPPKPGMKACGAMAAAGSVASRATPAPAPGSTQSPGDRTAGEPETLGQWGSRALSESHPRGEALPRDPHSHGLLAPGGSLEPKSGAAGRSLLRGVALVQHPEDIATLARHPEDAAALARHPEAARLYISNTSAASRHTAAVGGRKDVAVEGNLLGFSTESGIPASDHPRPQARSVAESPSYGPGLPPSPPENPQAKGREGVRFPRGAEPDHLLPAVPPAEVDMGWVGGTHQRGPPHLQAHLPPTAGDTQAKLRASVPEPRTQAGESQERPLTQADLGRQQSHQAQEETPQPGDAGKRVAPSGSKVVLNPAKEPQTWWAQDLAGDKGMAIGVGGACQRSDQGQQHLQGPWEERGRSTAWGEGTRAARNPAVPPGEPEGPGSPAAQGQAQKQVQEWDRGQVQGHAQEQAQWQTQIEAQGQAQEQAQGGTQGHSQGQAQKQFQNWAQGQAQGHAQEQAQWQTQIEAQGQAQEPAQGGAQGQVQGQAQKWAQGQIQGQAQKQVQGEVQKWAQEEAQGQAQWQTQIKAQKWAQEQTQKGAQERVQGQAQKGAQERAQEQAQEQTQIEAQGQAQKGAQERAREQAQKGAQERAREQAQKGAQERAREQAQKGAQERAREQAQKGAQERAREQAQKGAQERAREQAQKGAQERAQEQGREQTHIEAQGQAQKGAQEWARDRARDQGWEQTQIETQRQTQKGAQERAWEQGREQALTSGMAPRAWEQPISGIAEGVDAAGRSGGSRSPAPRDGGQSGGSGLGEPSAGYPPPGSRPLRGKSIATSPLGLGKSPTEPKPEAGGCGTPQAPAQEGSPDHPGAERALQDRMEASEPERRGRSRHLAKYKAQSFRDQRAFDLSFRPMSVRASDTSELPK

SEQ ID NO: 3862 - protein, 1276 aa, Homo sapiens
LKERMDEPNAEQVYNPSQFENLRKFWDLEANSNSKDNDKNITTTSQKNSAPFNRQKHKEFSDIKLSGKNTHEAEVLLSPKKVMAREEMEKLNSKGILQVLPDEITFPLSPLRKYTYQLPGNESSKENVEKNTEGIVTPVFKEEKDYSEQEIQESIIKTNVLSKDCKDTFNDSLQKLLSETSTPAIQPSGGKVHGKQVLEPSVSENRTWPQKTDFADTEEEVKGPEKIINEHVDKTVVHPKVKRNSLTASLDKLLKEATGTSPSPLQAKLAPVITGTNSKLEEGRFFGKGIEQSHNTSADKREILAPFPVRDETFGNTALLKKAESGECQLSTQNLIQMAAEDSHPLDPTSQLSRKGSFGDVASPPQDMLFPQDAHLVPQARVHPSQTEISETVEKVILPPRPVLNDVSAALQKLCGEVWLSYPAGREVGPGEVNPEFPEAVQPVCSPLNPPGVISPWATMDTIVPDRKDFYSSNVVPDKTHEVGSYLAAQMSPSDQTLSSFASIVAQYGKGLPQEVEEIVRETIVQPKSEFLEFSAGLEKLLKEETETFPSKYESDTGNLSPSKLIGSTEEPRRATSECHPEELKETVEKAEAPLITESAFDAGFEKLLKEITEAPPYQPQVSVREETHEKESSQSEQTRFLGTVPHFYRAASQTSEMKDKSNGLESQVNQCDKMLGGDALVTDLLVDFCGSRSGVEIPRTPQLYVAHEIGTIKTVTPPEDRDSESGVAGGQGTLQEPGFGEASEAISVSRNRQPIPLLMNKENSTKTSKVELTLASPYMKQEKEEEKEGFSESDFSDGNTSSNAESWRNPSSSEEEPSPVLKTLERSAARKMPSKSLEDISSDSSNQAKVDNQPEELVRSAEDDEKPDQKPVTNECVPRISTVPTQPDNPFSHPDKLKRMSKSVPAFLQDESDDRETDTASESSYQLSRHKKSPSSLTNLSSSSGMTSLSSVSGSVMSVYSGDFGNLEVKGNIQFAIEYVESLKELHVFVAQCKDLAAADVKKQRSDPYVKAYLLPDKGKMGKKKTLVVKKTLNPVYNEILRYKIEKQILKTQKLNLSIWHRDTFKRNSFLGEVELDLETWDWDNKQNKQLRWYPLKRKTAPVALEAENRGEMKLALQYVPEPVPGKKLPTTGEVHIWVKECLDLPLLRGSHLNSFVKCTILPDTSRKSRQKTRAVGKTTNPIFNHTMVYDGFRPEDLMEACVELTVWDHYKLTNQFLGGLRIGFGTGKSYGTEVDWMDSTSEEVALWEKMVNSPNTWIEATLPLRMLLIAKISK

SEQ ID NO: 3863 - protein, 138 aa, Homo sapiens
AITALRQTPQKVRLVVYRDEAHYRDEENLEIFPVDLQKKAGRGLGLSIVGKRNGSGVFISDIVKGGAADLDGRLIQGDQILSVNGEDMRNASQETVATILKCAQGLVQLEIGRLRAGSWTSARTTSQNSQVVDGFSSD

SEQ ID NO: 3864 - protein, 280 aa, Homo sapiens
EALGQGVARLVLPKLEGHTCEKCRELLKPGEYGVFAARAGEQRCWHQPCFACQACGQALINLIYFYHDGQLYCGRHHAELLRPRCPACDQLIFSWRCTEAEGQRWHENHFCCQDCAGPLGGGRYALPGGSPCCPSCFENRYSDAGSSWAGALEGQAFLGKGEDAEQSGRELGLGCGGSPGLGPSPRSHAVPSLQERPHRTPQTQASGPAALTAHPWPERSKGRPNPPRAAVGVAAPDSLPGAGGGRPLVEAGDPGEDSRRRRRRARPRGWAGREAGPHPH

SEQ ID NO: 3865 - protein, 593 aa, Homo sapiens
MVQGGFPEKIRQRYADLPGELHIIELEKDKNGLGLSLAGNKDRSRMSIFVVGINPEGPAAADGRMRIGDELLEINNQILYGRSHQNASAIIKTAPSKVKLVFIRNEDAVNQMAVTPFPVPSSSPSSIEDQSGTEPISSEEDGSVEVGIKQLPESESFKLAVSQMKQQKYPTKVSFSSQEIPLAPASSYHSTDADFTGYGGFQAPLSVDPATCPIVPGQEMIIEISKGRSGLGLSIVGGKDTPLNAIVIHEVYEEGAAARDGRLWAGDQILEVNGVDLRNSSHEEAITALRQTPQKVRLVVYRDEAHYRDEENLEIFPVDLQKKAGRGLGLSIVGKRNGSGVFISDIVKGGAADLDGRLIQGDQILSVNGEDMRNASQETVATILKCAQGLVQLEIGRLRAGSWTSARTTSQNSQGSQQSAHSSCHPSFAPVITGLQNLVGTKRVSDPSQKNSGTDMEPRTVEINRELSDALGISIAGGRGSPLGDIPVFIAMIQASGVAARTQKLKVGDRIVSINGQPLDGLSHADVVNLLKNAYGRIILQVVADTNISAIAAQLENMSTGYHLGSPTAEHHPEDTERCCNCPMDSPCPLLLG

SEQ ID NO: 3866 - protein, 145 aa, Homo sapiens
VQSLSSTPRVIPNVHNKANKITGNQNQDTQEKKEKRQGTAPPPMKLPPPYKALTDDSDENEEEDAFTDQKIRQRYADLPGELHIIELEKDKNGLGLSLAGNKDRSRMSIFVVGINPEGPAAADGRMRIGDELLETLTQNRIYSHP

SEQ ID NO: 3867 - protein, 3564 aa, Homo sapiens
MTAWRRFQSLLLLLGLLVLCARLLTAAKGQNCGGLVQGPNGTIESPGFPHGYPNYANCTWIIITGERNRIQLSFHTFALEEDFDILSVYDGQPQQGNLKVRLSGFQLPSSIVSTGSILTLWFTTDFAVSAQGFKALYEVLPSHTCGNPGEILKGVLHGTRFNIGDKIRYSCLPGYILEGHAILTCIVSPGNGASWDFPAPFCRAEGACGGTLRGTSSSISSPHFPSEYENNADCTWTILAEPGDTIALVFTDFQLEEGYDFLEISGTEAPSIWLTGMNLPSPVISSKNWLRLHFTSDSNHRRKGFNAQFQVKKAIELKSRGVKMLPSKDGSHKNSVLSQGGVALVSDMCPDPGIPENGRRAGSDFRVGANVQFSCEDNYVLQGSKSITCQRVTETLAAWSDHRPICRARTCGSNLRGPSGVITSPNYPVQYEDNAHCVWVITTTDPDKVIKLAFEEFELERGYDTLTVGDAGKVGDTRSVLYVLTGSSVPDLIVSMSNQMWLHLQSDDSIGSPGFKAVYQEIEKGGCGDPGIPAYGKRTGSSFLHGDTLTFECPAAFELVGERVITCQQNNQWSGNKPSCVFSCFFNFTASSGIILSPNYPEEYGNNMNCVWLIISEPGSRIHLIFNDFDVEPQFDFLAVKDDGISDITVLGTFSGNEVPSQLASSGHIVRLEFQSDHSTTGRGFNITYTTFGQNECHDPGIPINGRRFGDRFLLGSSVSFHCDDGFVKTQGSESITCILQDGNVVWSSTVPRCEAPCGGHLTASSGVILPPGWPGYYKDSLHCEWIIEAKPGHSIKITFDRFQTEVNYDTLEVRDGPASSSPLIGEYHGTQAPQFLISTGNFMYLLFTTDNSRSSIGFLIHYESVTLESDSCLDPGIPVNGHRHGGDFGIRSTVTFSCDPGYTLSDDEPLVCERNHQWNHALPSCDALCGGYIQGKSGTVLSPGFPDFYPNSLNCTWTIEVSHGKGVQMIFHTFHLESSHDYLLITEDGSFSEPVARLTGSVLPHTIKAGLFGNFTAQLRFISDFSISYEGFNITFSEYDLEPCDDPGVPAFSRRIGFHFGVGDSLTFSCFLGYRLEGATKLTCLGGGRRVWSAPLPRCVAECGASVKGNEGTLLSPNFPSNYDNNHECIYKIETEAGKGIHLRTRSFQLFEGDTLKVYDGKDSSSRPLGTFTKNELLGLILNSTSNHLWLEFNTNGSDTDQGFQLTYTSFDLVKCEDPGIPNYGYRIRDEGHFTDTVVLYSCNPGYAMHGSNTLTCLSGDRRVWDKPLPSCIAECGGQIHAATSGRILSPGYPAPYDNNLHCTWIIEADPGKTISLHFIVFDTEMAHDILKVWDGPVDSDILLKEWSGSALPEDIHSTFNSLTLQFDSDFFISKSGFSIQFSTSIAATCNDPGMPQNGTRYGDSREAGDTVTFQCDPGYQLQGQAKITCVQLNNRFFWQPDPPTCIAACGGNLTGPAGVILSPNYPQPYPPGKECDWRVKVNPDFVIALIFKSFNMEPSYDFLHIYEGEDSNSPLIGSYQGSQAPERIESSGNSLFLAFRSDASVGLSGFAIEFKEKPREACFDPGNIMNGTRVGTDFKLGSTITYQCDSGYKILDPSSITCVIGADGKPSWDQVLPSCNAPCGGQYTGSEGVVLSPNYPHNYTAGQICLYSITVPKEFVVFGQFAYFQTALNDLAELFDGTHAQARLLSSLSGSHSGETLPLATSNQILLRFSAKSGASARGFHFVYQAVPRTSDTQCSSVPEPRYGRRIGSEFSAGSIVRFECNPGYLLQGSTALHCQSVPNALAQWNDTIPSCVVPCSGNFTQRRGTILSPGYPEPYGNNLNCIWKIIVTEGSGIQIQVISFATEQNWDSLEIHDGGDVTAPRLGSFSGTTVPALLNSTSNQLYLHFQSDISVAAAGFHLEYKTVGLAACQEPALPSNSIKIGDRYMVNDVLSFQCEPGYTLQGRSHISCMPGTVRRWNYPSPLCIATCGGTLSTLGGVILSPGFPGSYPNNLDCTWRISLPIGYGAHIQFLNFSTEANHDFLEIQNGPYHTSPMIGQFSGTDLPAALLSTTHETLIHFYSDHSQNRQGFKLAYQAYELQNCPDPPPFQNGYMINSDYSVGQSVSFECYPGYILIGHPVLTCQHGINRNWNYPFPRCDAPCGYNVTSQNGTIYSPGFPDEYPILKDCIWLITVPPGHGVYINFTLLQTEAVNDYIAVWDGPDQNSPQLGVFSGNTALETAYSSTNQVLLKFHSDFSNGGFFVLNFHAFQLKKCQPPPAVPQAEMLTEDDDFEIGDFVKYQCHPGYTLVGTDILTCKLSSQLQFEGSLPTCEAQCPANEVRTGSSGVILSPGYPGNYFNSQTCSWSIKVEPNYNITIFVDTFQSEKQFDALEVFDGSSGQSPLLVVLSGNHTEQSNFTSRSNQLYLRWSTDHATSKKGFKIRYAAPYCSLTHPLKNGGILNRTAGAVGSKVHYFCKPGYRMVGHSNATCRRNPLGMYQWDSLTPLCQAVSCGIPESPGNGSFTGNEFTLDSKVVYECHEGFKLESSQQATAVCQEDGLWSNKGKPPTCKPVACPSIEAQLSEHVIWRLVSGSLNEYGAQVLLSCSPGYYLEGWRLLRCQANGTWNIGDERPSCRVISCGSLSFPPNGNKIGTLTVYGATAIFTCNTGYTLVGSHVRECLANGLWSGSETRCLAGHCGSPDPIVNGHISGDGFSYRDTVVYQCNPGFRLVGTSVRICLQDHKWSGQTPVCVPITCGHPGNPAHGFTNGSEFNLNDVVNFTCNTGYLLQGVSRAQCRSNGQWSSPLPTCRVVNCSDPGFVENAIRHGQQNFPESFEYGMSILYHCKKGFYLLGSSALTCMANGLWDRSLPKCLAISCGHPGVPANAVLTGELFTYGAVVHYSCRGSESLIGNDTRVCQEDSHWSGALPHCTGNNPGFCGDPGTPAHGSRLGDDFKTKSLLRFSCEMGHQLRGSPERTCLLNGSWSGLQPVCEAVSCGNPGTPTNGMIVSSDGILFSSSVIYACWEGYKTSGLMTRHCTANGTWTGTAPDCTIISCGDPGTLANGIQFGTDFTFNKTVSYQCNPGYVMEAVTSATIRCTKDGRWNPSKPVCKAVLCPQPPPVQNGTVEGSDFRWGSSISYSCMDGYQLSHSAILSCEGRGVWKGEIPQCLPVFCGDPGIPAEGRLSGKSFTYKSEVFFQCKSPFILVGSSRRVCQADGTWSGIQPTCIDPAHNTCPDPGTPHFGIQNSSRGYEVGSTVFFRCRKGYHIQGSTTRTCLANLTWSGIQTECIPHACRQPETPAHADVRAIDLPTFGYTLVYTCHPGFFLAGGSEHRTCKADMKWTGKSPVCKSKGVREVNETVTKTPVPSDVFFVNSLWKGYYEYLGKRQPATLTVDWFNATSSKVNATFSEASPVELKLTGIYKKEEAHLLLKAFQIKGQADIFVSKFENDNWGLDGYVSSGLERGGFTFQGDIHGKDFGKFKLERQDPLNPDQDSSSHYHGTSSGSVAAAILVPFFALILSGFAFYLYKHRTRPKVQYNGYAGHENSNGQASFENPMYDTNLKPTEAKAVRFDTTLNTVCTVV

SEQ ID NO: 3868 - protein, 451 aa, Homo sapiens
MAAGETQLYAKVSNKLKSRSSPSLLEPLLAMGFPVHTALKALAATGRKTAEEALAWLHDHCNDPSLDDPIPQEYALFLCPTGPLLEKLQEFWRESKRQCAKNRAHEVFPHVTLCDFFTCEDQKVECLYEALKRAGDRLLGSFPTAVPLALHSSISYLGFFVSGSPADVIREFAMTFATEASLLADCSVKPCTKQLHLTLAHKFYPHHQRTLEQLARAIPLGHSCQWTAALYSRDMRFVHYQTLRALFQYKPQNVDELTLSPGDYIFVDPTQQDEASEGWVIGISQRTGCRGFLPENYTDRASESDTWVKHRMYTFSLATDLNSRKDGEASSRCSGEFLPQTARSLSSLQALQATVARKSVLVVRHGERVDQIFGKAWLQQCSTPDGKYYRPDLNFPCSLPRRSRGIKDFENDPPLSSCGIFQSRIAGMFEDCLVGKVTITATLIMASRHPA

SEQ ID NO: 3869 - protein, 108 aa, Homo sapiens
MRPSVWAAVAAGLWVLCTVIAEGPPALPALALPLAGAPDAGGCQGAEGPLPUAGTARLLQEGPRGPEEASQTPESGLASVPQSQRGLQPPAPAHVGAPAGCTLWALPL

SEQ ID NO: 3870 - protein, 3432 aa, Homo sapiens
MASERPEPEVEEAGQVFLLMKKDYRISRNVRLAWFLSHLHQTVQATPQEMLLQSEQELEVLSVLPPGWQPDEPVVPRPFLLVPSTRVTFLAWQYRFVIELDLSPSTGIVDDSTGEILFDEVFHALSRCLGGLLRPFRVPGSCIDFQPEIYVTIQAYSSIIGLQSHQVLVQGCLLDPSQREVFLQQIYEQLCLFEDKVATMLQQQYDPQSQAEDQSPDSGDLLGRKVGVSMVTADLGLVSMIRQGILALQLLPSNSSAGIIVITDGVTSVPDVAVCETLLNQLRSGTVACSFVQVGGVYSYDCSFGHVPNVELMKFIAMATFGSYLSTCPEPEPGNLGLTVYHRAFLLYSFLRSGEALNPEYYCGSQHRLFNEHLVSASSNPALALRRKKHTEKEVPADLVSTVSVRLREGYSVREVTLAKGGSQLEVKLVLLWKHNMRIEYVAMAPWPLEPEGPRVTRVEVTMEGGYDILHDVSCALRQPIRSLYRTHVIRRFWNTLQSINQTDQMLAHLQSFSSVPEHFTLPDSTKSGVPLFYIPPGSTTPVLSLQPSGSDSSHAQFAAYWKPVLSMDANSWQRWLHMHRLVLILEHDTPIPKHLHTPGSNGRYSTIQCRISHSSLTSLLRDWSSFVLVEGYSYVKLLSSAPDQPPNSFYMVRIISKAPCMVLRLGFPIGTPAPARHKIVSGLREEILRLRFPHRVQSKEPTPKVKRKGLGGAGGGSSPSKSPPVLGPQQALSDRPCLVVLHKPLDKLLIRYEKLPLDYRAPFLLTLEPPGPLPLVSGRSASSSLASLSRYLYHQRWLWSVPSGLAPALPLSAIAQLLSILTEVRLSEGFHFACSGEGIINMVLELPIQNEPPGQAAAEEKHTCVVQYILFPPHSTSTKDSFSTDDDNDVEVEALEGDSELNLVTEVWVEPQYGRVGPGPGIWKHLQDLTYSEIPQALHPRDAACIGSMLSFEYLIQLCQSKEWGPLPPEPRVSDGLDQGGDTCVHEIPFHFDLMGLLPQCQQLQMFFLLLAREPEGVPFAEGSCPANDMVLCLLHSCLGQELSDREIPLTPVDQAAFLSEVLRRTCHVPGAEGPLLGVHGIPKEQAVGSTQATGDSAFTSLSVGLPETLKPLISAQPPQWRCYARLVNPQHVFLTFLPATFSDVQRLAACGLEGPPQEETKPKFGDWSGAPSLKDLGGTGIKATKSHVPVLSVTLASDNAQNQGELSPPFRRDLQAYAGRQASQTESADGPRTRCPVYIYSCSLEALREQMVGMQPPQAPRDLIFRTQFLDHPSPSSAWMEPRYKEAANHCALLQEHAQRCYVRGLFRSLQQAQSVTSQDLLTAVDACEELLQEIDITPFLLALCGHTWGLPHAPPSPGPLSPGPFSSSMEEGAEPRERAILASESSIETEDLSEPEFQSTRVPGIPDPGPEISLTDVCQLRGEAHGALHSVIQEKFLEISRLHFRTVPSNPHYFFYCPPSSRREDEGPRDTVDRKISDLEFSEAELMGEEGDTSACCVVTESDPELEVEYRESRESDLGPAGLDSASLSDVDTVNPDEDSFSILGGDSPTGPESFLHDLPPLFLHLTCSVRLRGQHSSVPVCSLPTCLGQVLSSLEGPPVGGRVPLRDLSVTLDVFMLTLPLEVELPTASDPQHHRSTSESSASFPRSPGQPSSLRSDDGLGPPLPPPEEERHPGLSNLATPHRLAIETTMNEIRWLLEDEMVGALRRGGIPQSPALHRAAAHIHSSPGRSTCLRQTLPLSFVFGPERSLTQFKEEFRRLHLPGHVLLEDPDSGFFFVAAGQQPGGSHGEPSSAAWAWHSHEDRAEGIEGETLTASPQAPGSPEDSEGVPLISLPRVPQGGSQPGPSRGLSLMSSQGSVDSDHLGYDGGSSGSDSEGPNDTLGEKAPFTLRTPPGPAPPQPSLSGLPGPCLPDFWLIVRVLQDRVEVYAHARSLIREDGGPGTECRHLQQLLVRRVGEICREVNQRLLLQDLHDSHVCNSLLVAESEEDLWRSETPFHSRQRAPLPSDDYAADESCAPRGYLAATMQFVPGHFSCDVVWGTVIRVHSRLKMGPSMGVSRAIQALRSVLNAFSVVNRKNMFVYQERATKAVYYLRLLETSCSDRPWKGDALPPSLALSRSQEPIYSEEASGPRSPLDMVSSRSSDAARPVGQVDRHIQLLVHGVGQAGPEITDELVRVLCRRLDEATLDVITVMLVRNCKLTPADVEFIQPPGSLPSEVLHLALPTSCRPWLPALAWYLRQNLLIFLHSPKYTDSNSRNHFQHPLPPQGGLPDLDIYLYNKPGGQGTGGKGVACITLAFVDEGGAPLSLALWPPSSPGPPDPLREEEFEQLTQVIRCPVVVDSSSAQNGAPRLRLDVWEKGNISIVQLEEKLRGAARQALADAIIELQLLPASLCTEDTPTGSLRNGSLETKSSAGRASTFPPAPVPGEPVTPPSKAGRRSFWDMLSKTECGDLGSPKTTDDIVLDRPEDTRGRRRHKTESVRTPGGAERAPGSDSGAQRQKRRTTQLEEGEVGTLHPVFARVAQRWMEFMVQIGCASVSRSSAHMVSRFLLPSILSEFTALVTSMAGDTSVRIFEQHLGSEPEIFGPCSPGQLGPSPRPAAERHLLLLGRNFLQWRRPTQQAAKAMQRFEPGGDGSSGRNAPRQRLLLLEVVDKKLQLLTYNWAPDLGAALGRALVRLVQWQNARAHLIFCLLSQKLGLFHHYGQLDFPVRDEKEPNPFLLPTMEVETLIRSASPPLSREQGRLSGSSRGGGPLPLDTFPFDEALRDITAARPSSVLGPVPRPPDPVTYHGQQFLEIKMAERRELERQMKMENLFVTWQQRSTPATMPISAGELETLKQSSRLVHYCATAMLFDPAAWLHGPPETSGPPDGQRRHRPESGSGSREAPTSCESLDVSPPGAREEPWLKELSLAFLQQYVQYLQSIGFVLVPLRPPSPARSTSRPRAMAILGTEGRGSFSCPKTKTDGSPKSTSSPVTTYHLQRALPGGIILMELAFQGCYFCVKQFALECSRIPMGQAVNSQLSMLFTEECDKVRDLMHVHSFSYDFHLRLVHQHVLGAHLVLRHGYHLTTFLRHFLAHHPDGPHFGRNHIYQGTLELPTPLIAAHQLYNYVADHASSYHMKPLRMARPGGPEHNEYALVSAWHSSGSYLDSEGLRHQDDFDVSLLVCHCAAPFEEQGEAERHVLRLQFFVVLTSQRELFPRLTADMRRFRKPPRLPPEPEAPGSSAGSPGEASGLILAPGPAPLFPPLAAEVGMARARLAQLVRLAGGHCRRDTLWKRLFLLEPPGPDRLRLGGRLALAELEELLEAVHAKSIGDIDPQLDCFLSMTVSWYQSLIKVLLSRFPQSCRHFQSPDLGTQYLVVLNQKFTDCFVLVFLDSHLGKTSLTVVFREPFPVQPQDSESPPAQLVSTYHHLESVINTACFTLWTRLL

SEQ ID NO: 3871 - protein, 62 aa, Homo sapiens
MDMRWHCENLQTTDDILVASAECPSDDEDIDPCEPSSGTKQTMWKTSRDHRILPNARRERKD

SEQ ID NO: 3872 - protein, 2223 aa, Homo sapiens
MIDLSFLTEEEQEAIMKVLQRDAALKRAEEERVRHLPEKIKDDQQLKNMSGQWFYEAKAKRHRDKIHGADIIRASMRKKRPQIAAEQSKDRENGAKESWVNNVNKDAFLPPELAGVVEEPEEDAAPASPSSSVVNPASSVIDMSQENTRKPNVSPEKQRKNPFNSSKLPEGHSSQQTKNEQSKNGRTGLFQTSKEDELSESKEKSTVADTSIQKLEKSKQTLPGLSNGSQIKAPIPKARKMIYKSTDLNKDDNQSFPRQRTDSLKARGAPRGILKRNSSSSSTDSETLRYNHNFEPKSKIVSPGLTIHERISEKEHSLEDNSSPNSLEPLKHVRFSAVKDELPQSPGLIHGREVGEFSVLESDRLKNGMEDAGDTEEFQSDPKPSQYRKPSLFHQSTSSPYVSKSETHQPMTSGSFPINGLHSHSEVLTARPQSMENSPTINEPKDKSSELTRLESVLPRSPADELSHCVEPEPSQVPGGSSRDRQQGKPPPLPALKAKTSSRSGPYATEIKKSTDDSIFKVLDWFNRSSYSDDNKSFLQHPRGIESKEKTDSKSQVAVDLVTDDTTLRENGSKTLSPSKIELKPVRSDSPFQAEGDMLVSESCQDNNVNIKSKFMNLSQKGTPKEGPGILQPFESYGTPSQGSKNMDYSQDSKSPGKGNGASPSNSNYSYSVLKESDAENQVPCNTNNIGNLGEEEPKFHAHEENRGHSEVNFDSSTVVKEPGLKDNMNAERKSKVGNTYILKASLEPENIKSTPGVANNGSPWKKPEVQFQQEAGEVPKNQVQREKYKRVSDRISFWEGEKAGAKITHEKPTSSCSQEQPSAKAYQPVKKSQGVSSMDSLSTDQSEYNQAIPKRVVLDEDDQASQLSNSYSSNKSKETKPQIAGPSRYYLSAEQSDKVSLFQNKKNEPIKRSQVADSLPSRRNITLPALQPPSNVGSERHAPLEKDRPLVRESNANFKVMSLKERMDEPNAEQVYNPSQFENLRKFWDLEANSNSKDNDKNITTTSQKNSAPFNRQKHKEFSDIKLSGKNTHEAEVLLSPKKVMAREEMEKLNSKGILQVLPDEITFPLSPLRKYTYQLPGNESSKENVEKNTEGIVTPVFKEEKDYSEQEIQESIIKTNVLSKDCKDTFNDSLQKLLSETSTPAIQPSGGKVHGKQVLEPSVSENRTWPQKTDFADTEEEVKGPEKIINEHVDKTVVHPKVKRNSLTASLDKLLKEATGTSPSPLQAKLAPVITGTNSKLEEGRFFGKGIEQSHNTSADKREILAPFPVRDETFGNTALLKKAESGECQLSTQNLIQMAAEDSHPLDPTSQLSRKGSFGDVASPPQDMLFPQDAHLVPQARVHPSQTEISETVEKVILPPRPVLNDVSAALQKLCGEVWLSYPAGREVGPGEVNPEFPEAVQPVCSPLNPPGVISPWATMDTIVPDRKDFYSSNVVPDKTHEVGSYLAAQMSPSDQTLSSFASIVAQYGKGLPQEVEEIVRETIVQPKSEFLEFSAGLEKLLKEETETFPSKYESDTGNLSPSKLIGSTEEPRRATSECHPEELKETVEKAEAPLITESAFDAGFEKLLKEITEAPPYQPQVSVREETHEKESSQSEQTRFLGTVPHFYRAASQTSEMKDKSNGLESQVNQCDKMLGGDALVTDLLVDFCGSRSGVEIPRTPQLYVAHEIGTIKTVTPPEDRDSESGVAGGQGTLQEPGFGEASEAISVSRNRQPIPLLMNKENSTKTSKVELTLASPYMKQEKEEEKEGFSESDFSDGNTSSNAESWRNPSSSEEEPSPVLKTLERSAARKMPSKSLEDISSDSSNQAKVDNQPEELVRSAEDVSTVPTQPDNPFSHPDKLKRMSKSVPAFLQDESDDRETDTASESSYQLSRHKKSPSSLTNLSSSSGMTSLSSVSGSVMSVYSGDFGNLEVKGNIQFAIEYVESLKELHVFVAQCKDLAAADVKKQRSDPYVKAYLLPDKGKMGKKKTLVVKKTLNPVYNEILRYKIEKQILKTQKLNLSIWHRDTFKRNSFLGEVELDLETWDWDNKQNKQLRWYPLKRKTAPVALEAENRGEMKLALQYVPEPVPGKKLPTTGEVHIWVKECLDLPLLRGSHLNSFVKCTILPDTSRKSRQKTRAVGKTTNPIFNHTMVYDGFRPEDLMEACVELTVWDHYKLTNQFLGGLRIGFGTGKSYGTEVDWMDSTSEEVALWEKMVNSPNTWIEATLPLRMLLIAKISK

SEQ ID NO: 3873 - protein, 353 aa, Homo sapiens
STAKLFVEGRDVRIRSIKKEVQVIEKQRAVVEFEVNEDDVDAHWYKDGIEINFQVQERHKYVVERRIHRMFISETRQSDAGEYTFVAGRNRSSVTLYVNAPEPPQVLQELQPVTVQSGKPARFCAVISGRPQPKISWYKEEQLLSTGFKCKFLHDGQEYTLLLIEAFPEDAAVYTCEAKNDYGVATTSASLSVEVPEVVSPDQEMPVYPPAIITPLQDTVTSEGQPARFQCRVSGTDLKVSWYSKDKKIKPSRFFRMTQFEDTYQLEIAEAYPEDEGTYTFVASNAVGQVSSTANLSLEAKESQARALTKITLGSDTKSIKTLRESQIKTTREVKRESSKKTSSLSLTSCQKP

SEQ ID NO: 3874 - protein, 866 aa, Homo sapiens
LKERMDEPNAEQVYNPSQFENLRKFWDLEANSNSKDNDKNITTTSQKNSAPFNRQKHKEFSDIKLSGKNTHEAEVLLSPKKVMAREEMEKLNSKGILQVLPDEITFPLSPLRKYTYQLPGNESSKENVEKNTEGIVTPVFKEEKDYSEQEIQESIIKTNVLSKDCKDTFNDSLQKLLSETSTPAIQPSGGKVHGKQVLEPSVSENRTWPQKTDFADTEEEVKGPEKIINEHVDKTVVHPKVKRNSLTASLDKLLKEATGTSPSPLQAKLAPVITGTNSKLEEGRFFGKGIEQSHNTSADKREILAPFPVRDETFGNTALLKKAESGECQLSTQNLIQMAAEDSHPLDPTSQLSRKGSFGDVASPPQDMLFPQDAHLVPQARVHPSQTEISETVEKVILPPRPVLNDVSAALQKLCGEVWLSYPAGREVGPGEVNPEFPEAVQPVCSPLNPPGVISPWATMDTIVPDRKDFYSSNVVPDKTHEVGSYLAAQMSPSDQTLSSFASIVAQYGKGLPQEVEEIVRETIVQPKSEFLEFSAGLEKLLKEETETFPSKYESDTGNLSPSKLIGSTEEPRRATSECHPEELKETVEKAEAPLITESAFDAGFEKLLKEITEAPPYQPQVSVREETHEKESSQSEQTRFLGTVPHFYRAASQTSEMKDKSNGLESQVNQCDKMLGGDALVTDLLVDFCGSRSGVEIPRTPQLYVAHEIGTIKTVTPPEDRDSESGVAGGQGTLQEPGFGEASEAISVSRNRQPIPLLMNKENSTKTSKVELTLASPYMKQEKEEEKEGFSESDFSDGNTSSNAESWRNPSSSEEEPSPVLKTLERSAARKMPSKSLEDISSDSSNQAKVDNQPEELVRSAEDDF

SEQ ID NO: 3875 - protein, 132 aa, Homo sapiens
MRPSVWAAVAAGLWVLCTVIAEGPPALPALALPLAGAPDAGGCQGAEGPLRGRGAELGAAQLLLPPQEGSSAAIAUAGTARLLQEGPRGPEEASQTPESGLASVPQSQRGLQPPAPAHVGAPAGCTLWALPL

SEQ ID NO: 3876 - protein, 208 aa, Homo sapiens
MLSPTFVLWDVGYPLYTYGSICIIALIIWQVKKSCQKLSLVPNRSCCRCHRRVQQKSGDRTSRARRTSQEEAEKLWKLLFLMKSQGWLPQEGSVRRILCADPCCQICNVMALEIKQLLAAPEVGLDNKMKLFLHWINPEMKDRRHEESILLSKAETVTQDRTKNIEKSPTVTKDHVWGATTQKTTEDPEAQPPSTEEEGLIFCDAPSA

SEQ ID NO: 3877 - protein, 338 aa, Homo sapiens
MLSPTFVLWDVGYPLYTYGSICIIALIIWQVKKSCQKLSLVPNRSCCRCHRRVQQKSGDRTSRARRTSQEEAEKLWKLLFLMKSQGWLPQEGSVRRILCADPCCQICNVMALEIKQLLAGENNQISLTSLGPSQGSSCLEALSTSSVSFKHSQDLGSPKSKELSLASVTPTLSQLMDQKSLTQSAARSAGADSVQDSWADHFQRGQRSQVPAVSQVMGSLSSNFEKPGIPLSQQERTKNNSKFVLENQEAPEVGLDNKMKLFLHWINPEMKDRRHEESILLSKAETVTQDRTKNIEKSPTVTKDHVWGATTQKTTEDPEAQPPSTEEEGLIFCDAPSA

SEQ ID NO: 3878 - protein, 533 aa, Homo sapiens
MKRTPTAEEREREAKKLRLLEELEDTWLPYLTPKDDEFYQQWQLKYPKLILREASSVSEELHKEVQEAFLTLHKHGCLFRDLVRIQGKDLLTPVSRILIGNPGCTYKYLNTRLFTVPWPVKGSNIKHTEAEIAAACETFLKLNDYLQIETIQALEELAAKEKANEDAVPLCMSADFPRVGMGSSYNGQDEVDIKSRAAYNVTLLNFMDPQKMPYLKEEPYFGMGKMAVSWHHDENLVDRSAVAVYSYSCEGPEEESEDDSHLEGRDPDIWHVGFKISWDIETPGLAIPLHQGDCYFMLDDLNATHQHCVLAGSQPRFSSTHRVAECSTGTLDYILQRCQLALQNVCDDVDNDDVSLKSFEPAVLKQGEEIHNEVEFEWLRQFWFQGNRYRKCTDWWCQPMAQLEALWKKMEGVTNAVLHEVKREGLPVEQRNEILTAILASLTARQNLRREWHARCQSRIARTLPADQKPECRPYWEKDDASMPLPFDLTDIVSELRDRVSPCHVGWSAVVRSRLTAASTSWAQAILLPQPPK

SEQ ID NO: 3879 - protein, 457 aa, Homo sapiens
MKRTPTAEEREREAKKLRLLEELEDTWLPYLTPKDDEFYQQWQLKYPKLILREASSVSEELHKEVQEAFLTLHKHGCLFRDLVRIQGKDLLTPVSRILIGNPGCTYKYLNTRLFTVPWPVKGSNIKHTEAEIAAACETFLKLNDYLQIETIQALEELAAKEKANEDAVPLCMSADFPRVGMGSSYNGQDEVDIKSRAAYNVTLLNFMDPQKMPYLKEEPYFGMGKMAVSWHHDENLVDRSAVAVYSYSCEGPEEESEDDSHLEGRDPDIWHVGFKISWDIETPGLAIPLHQGDCYFMLDDLNATHQHCVLAGSQPRFSSTHRVAECSTGTLDYILQRCQLALQNVCDDVDNDDVSLKSFEPAVLKQGEEIHNEVEFEWLRQFWFQGNRYRKCTDWWCQPMAQLEALWKKMEGVTNAVLHEVKREGLPVEQRNEILTAILASLTARQNLRREWHARVE

SEQ ID NO: 3880 - protein, 4471 aa, Homo sapiens
MVPEEVEVEIDEIPVLSEEGEEEEETYSQKVESVDKVRAKRVSLRTESLGQPLNREDEEMDKEISEKLPSKRTAKHIMEKMHLHMLCTPLPEEFLDQNVVFFLRNTKEAISEATDMKEAMEIMPETLEYGIINANVLHFLKNIICQVFLPALSFNQHRTSTTVGVTSGEVSNSSEHESDLPPMPGEAVEYHSIQLIRDEFLMNVQKFASNIQRTMQQLEGEIKLEMPIISVEGEVSDLAADPETVDILEQCVINWLNQISTAVEAQLKKTPQGKGPLAEIEFWRERNATLSALHEQTKLPIVRKVLDVIKESDSMLVANLQPVFTELFKFHTEASDNVRFLSTVERYFKNITHGSGFHVVLDTIPAMMSALRMVWIISRHYNKDERMIPLMERIAWEIAERVCRVVNLRTLFKENRASAQSKTLEARNTLRLWKKAYFDTRAKIEASGREDRWEFDRKRLFERTDYMATICQDLSDVLQILEEFYNIFGPELKAVTGDPKRIDDVLCRVDGLVTPMENLTFDPFSIKSSQFWKYVMDEFKIEVLIDIINKIFVQNLENPPLYKNHPPVAGAIYWERSLFFRIKHTILRFQEVQEILDSDRGQEVKQKYLEVGRTMKEYEDRKYEQWMEVTEQVLPALMKKSLLTKSSIATEEPSTLERGAVFAINFSPALREIINETKYLEQLGFTVPELARNVALQEDKFLRYTAGIQRMLDHYHMLIGTLNDAESVLLKDHSQELLRVFRSGYKRLNWNSLGIGDYITGCKQAIGKFESLVHQIHKNADDISSRLTLIEAINLFKYPAAKSEEELPGVKEFFEHIERERASDVDHMVRWYLAIGPLLTKVEGLVVHTNTGKAPKLASYYKYWEKKIYEVLTKLILKNLQSFNSLILGNVPLFHTETILTAPEIILHPNTNEIDKMCFHCVRNCVEITKHFVRWMNGSCIECPPQKGEEEEVVIINFYNDISLNPQIIEQAVMIPQNVHRILINLMKYLQKWKRYRPLWKLDKAIVMEKFAAKKPPCVAYDEKLQFYSKIAYEVMRHPLIKDEHCIRLQLRHLANTVQENAKSWVISLGKLLNESAKEELYNLHEEMEHLAKNLRKIPNTLEDLKFVLATIAEIRSKSLVMELRYRDVQERYRTMAMYNLFPPDAEKELVDKIESIWSNLFNDSVNVEHALGDIKRTFTELTRGEIMNYRVQIEEFAKRFYSEGPGSVGDDLDKGVELLGVYERELARHEKSRQELANAEKLFDLPITMYPELLKVQKEMSGLRMIYELYEGLKVAKEEWSQTLWINLNVQILQEGIEGFLRALRKLPRPVRGLSVTYYLEAKMKAFKDSIPLLLDLKNEALRDRHWKELMEKTSVFFEMTETFTLENMFAMELHKHTDVLNEIVTAAIKEVAIEKAVKEILDTWENMKFTVVKYCKGTQERGYILGSVDEIIQSLDDNTFNLQSISGSRFVGPFLQTVHKWEKTLSLIGEVIEIWMLVQRKWMYLESIFIGGDIRSQLPEEAKKFDNIDKVFKRIMGETLKDPVIKRCCEAPNRLSDLQNVSEGLEKCQKSLNDYLDSKRNAFPRFFFISDDELLSILGSSDPLCVQEHMIKMYDNIASLRFNDGDSGEKLVSAMISAEGEVMEFRKILRAEGRVEDWMTAVLNEMRRTNRLITKEAIFRYCEDRSRVDWMLLYQGMVVLAASQVWWTWEVEDVFHKAQKGEKQAMKNYGRKMHRQIDELVTRITMPLSKNDRKKYNTVLIIDVHARDIVDSFIRGSILEAREFDWESQLRFYWDREPDELNIRQCTGTFGYGYEYMGLNGRLVITPLTDRIYLTLTQALSMYLGGAPAGPAGTGKTETTKDLAKALGLLCVVTNCGEGMDYRAVGKIFSGLAQCGAWGCFDEFNRIDASVLSVISSQIQTIRNALIHQLTTFQFEGQEISLDSRMGIFITMNPGYAGRTELPESVKALFRPVVVIVPDLQQICEIMLFSEGFLEAKTLAKKMTVLYKLAREQLSKQYHYDFGLRALKSVLVMAGELKRGSSDLREDVVLMRALRDMNLPKFVFEDVPLFLGLISDLFPGLDCPRVRYPDFNDAVEQVLEENGYAVLPIQVDKVVQMFETMLTRHTTMVVGPTRGGKSVVINTLCQAQTKLGLTTKLYILNPKAVSVIELYGILDPTTRDWTDGVLSNIFREINKPTDKKERKYILFDGDVDALWVENMNSVMDDNRLLTLANGERIRLQAHCALLFEVGDLQYASPATVSRCGMVYVDPKNLKYRPYWKKWVNQIPNKVEQYNLNSLFEKYVPYLMDVIVEGIVDGRQAEKLKTIVPQTDLNMVTQLAKMLDALLEGEIEDLDLLECYFLEALYCSLGASLLEDGRMKFDEYIKRLASLSTVDTEGVWANPGELPGQLPTLYDFHFDNKRNQWVPWSKLVPEYIHAPERKFINILVHTVDTTRTTWILEQMVKIKQPVIFVGESGTSKTATTQNFLKNLSEETNIVLMVNFSSRTTSMDIQRNLEANVEKRTKDTYGPPMGKRLLVFMDDMNMPRVDEYGTQQPIALLKLLLEKGYLYDRGKELNCKSIRDLGFIAAMGKAGGGRNEVDPRFISLFSVFNVPFPSEESLHLIYSSILKGHTSTFHESIVAVSGKLTFCTLALYKNIVQDLPPTPSKFHYIFNLRDLSRVFNGLVLTNPERFQTVAQMVRVWRNECLRVFHDRLISETDKQLVQQHIGSLVVEHFKDDVEVVMRDPILFGDFQMALHEGEPRIYEDIQDYEAAKALFQEILEEYNESNTKMNLVLFDDALEHLTRVHRIIRMDRGHALLVGVGGSGKQSLSRLAAFTASCEVFEILLSRGYSENSFREDLKSLYLKLGIENKAMIFLFTDAHVAEEGFLELINNMLTSGIVPALFSEEEKESILSQIGQEALKQGMGPAKESVWQYFVNKSANNLHIVLGMSPVGDTLRTWCRNFPGMVNNTGIDWFMPWPPQALHAVAKSFLGYNPMIPAENIENVVKHVVLVHQSVDHYSQQFLQKLRRSNYVTPKNYLDFINTYSKLLDEKTQCNIAQCKRLDGGLDKLKEATIQLDELNQKLAEQKIVLAEKSAACEALLEEIAVNTAVAEEKKKLAEEKAMEIEEQNKVIAMEKAEAETTLAEVMPILEAAKLELQKLDKSDVTEIRSFAKPPKQVQTVCECILIMKGYKELNWKTAKGVMSDPNFLRSLMEIDFDSITQSQVKNIKGLLKTLNTTTEEMEAVSKAGLGMLKFVEAVMGYCDVFREIKPKREKVARLERNFYLTKRELERIQNELAAIQKELETLGAKYEAAILEKQKLQEEAEIMERRLIAADKLISGLGSENIRWLNDLDELMHRRVKLLGDCLLCAAFLSYEGAFTWEFRDEMVNRIWQNDILEREIPLSQPFRLESLLTDDVEISRWGSQGLPPDELSVQNGILTTRASRFPLCIDPQQQALNWIKRKEEKNNLRVASFNDPDFLKQLEMSIKYGTPFLFRDVDEYIDPVIDNVLEKNIKVSQGRQFIILGDKEVDYDSNFRLYLNTKLANPRYSPSVFGKAMVINYTVTLKGLEDQLLSVLVAYERRELEEQREHLIQETSENKNLLKDLEDSLLRELATSTGNMLDNVDLVHTLEETKSKATEVSEKLKLAEKTALDIDRLRDGYRPAARRGAILFFVLSEMALVNSMYQYSLIAFLEVFRLSLKKSLPDSILMKRLRNIMDTLTFSIYNHGCTGLFERHKLLFSFNMTIKIEQAEGRVPQEELDFFLKGNISLEKSKRKKPCAWLSDQGWEDIILLSEMFSDNFGQLPDDVENNQTVWQEWYDLDSLEQFPVPLGYDNNITPFQKLLILRCFRVDRVYRAVTDYVTVTMGEKYVQPPMISFEAIFEQSTPHSPIVFILSPGSDPATDLMKLAERSGFGGNRLKFLAMGQGQEKVALQLLETAVARGQWLMLQNCHLLVKWLKDLEKSLERITKPHPDFRLWLTTDPTKGFPIGILQKSLKVVTEPPNGLKLNMRATYFKISHEMLDQCPHPAFKPLVYVLAFFHAVVQERRKFGKIGWNVYYDFNESDFQVCMEILNTYLTKAFQQRDPRIPWGSLKYLIGEVMYGGRAIDSFDRRILTIYMDEYLGDFIFDTFQPFHFFRNKEVDYKIPVGDEKEKFVEAIEALPLANTPEVFGLHPNAEIGYYTQAARDMWAHLLELQPQTGESSSGISRDDYIGQVAKEIENKMPKVFDLDQVRKRLGTGLSPTSVVLLQELERFNKLVVRMTKSLAELQRALAGEVGMSNELDDVARSLFIGHIPNIWRRLAPDTLKSLGNWMVYFLRRFSQYMLWVTESEPSVMWLSGLHIPESYLTALVQATCRKNGWPLDRSTLFTQVTKFQDADEVNERAGQGCFVSGLYLEGADWDIEKGCLIKSKPKVLVVDLPILKIIPIEAHRLKLQNTFRTPVYTTSMRRNAMGVGLVFEADLFTTRHISHWVLQGVCLTLNSD

SEQ ID NO: 3881 - protein, 339 aa, Homo sapiens
MTARAFWLLCLIVGSSPEAPVAERKTSPPHSRKPDSRGCPSAEETPGPRAQPLLEAPQRPRAAEVAPAARAWPDPRRRKPPPPADNQASFREAARAPAGPPGPRLAQAENRASPRREPASEDAPRRARSRALRFPAARPPALATEGSAGHAHPNRPRAAALAPGPAPAPPPRFSLSFGLSPPQRDAEPGAEPCARACRSDLDEREAFCESEFAVNGIVHDVDVLGAGIRLVTLLVDRDGLYKMNRLYLTPDGFFFRVHMLALDSSSCNKPCPEFKPGSRYIVMGHIYHKRRQLPTALLQVLRGRLRPGDGLLRSSSSYVKRFNRKREGQIQGAIHTQCI

SEQ ID NO: 3882 - protein, 143 aa, Homo sapiens
MDMRWHCENLQVTTDDILVASAECPSDDEDIDPCEPSSGGLANPTRAGGREPYPGSAEVIRESSSTTGMVVGIVAAAALCILILLYAMYKYRNRDEGSYHVDESRNYISNSAQSNGAVVKEKQPSSAKSSNKNKKNKDKEYYV

SEQ ID NO: 3883 - protein, 584 aa, Homo sapiens
MAEPQAESEPLLGGARGGGGDWPAGLTTYRSIQVGPGAAARWDLCIDQAVVFIEDAIQYRSINHRVDASSMWLYRRYYSNVCQRTLSFTIFLILFLAFIETPSSLTSTADVRYRAAPWEPPCGLTESVEVLCLLVFAADLSVKGYLFGWAHFQKNLWLLGYLVVLVVSLVDWTVSLSLVCHEPLRIRRLLRPFFLLQNSSMMKKTLKCIRWSLPEMASVGLLLAIHLCLFTMFGMLLFAGGKQDDGQDRERLTYFQNLPESLTSLLVLLTTANNPDVMIPAYSKNRAYAIFFIVFTVIGSLFLMNLLTAIIYSQFRGYLMKSLQTSLFRRRLGTRAAFEVLSSMVGEGGAFPQAVGVKPQNLLQVLQKVQLDSSHKQAMMEKVRSYGSVLLSAEEFQKLFNELDRSVVKEHPPRPEYQSPFLQSAQFLFGHYYFDYLGNLIALANLVSICVFLVLDADVLPAERDDFILGILNCVFIVYYLLEMLLKVFALGLRGYLSYPSNVFDGLLTVVLLEAGDGGPAVAVGHDPHAEHAHRVPLPAYHPQHEADGRGGQYRPGPGAEHACVWRDPGGGLLRICHHWDQLV

SEQ ID NO: 3884 - protein, 710 aa, Homo sapiens
MGMACLTMTEMEGTSTSSIYQNGDISGNANSMKQIDPVLQVYLYHSLGKSEADYLTFPSGEYVAEEICIAASKACGITPVYHNMFALMSETERIWYPPNHVFHIDESTRHNVLYRIRFYFPRWYCSGSNRAYRHGISRGAEAPLLDDFVMSYLFAQWRHDFVHGWIKVPVTHETQEECLGMAVLDMMRIAKENDQTPLAIYNSISYKTFLPKCIRAKIQDYHILTRKRIRYRFRRFIQQFSQCKATARNLKLKYLINLETLQSAFYTEKFEVKEPGSGPSGEEIFATIIITGNGGIQWSRGKHKESETLTEQDLQLYCDFPNIIDVSIKQANQEGSNESRVVTIHKQDGKNLEIELSSLREALSFVSLIDGYYRLTADAHHYLCKEVAPPAVLENIQSNCHGPISMDFAISKLKKAGNQTGLYVLRCSPKDFNKYFLTFAVERENVIEYKHCLITKNENEEYNLSGTKKNFSSLKDLLNCYQMETVRSDNIIFQFTKCCPPKPKDKSNLLVFRTNGVSDVPTSPTLQRPTHMNQMVFHKIRNEDLIFNESLGQGTFTKIFKGVRREVGDYGQLHETEVLLKVLDKAHRNYSESFFEAASMMSKLSHKHLVLNYGVCVCGDENILVQEFVKFGSLDTYLKKNKNCINILWKLEVAKQLAWAMHFLEENTLIHGNVCAKNILLIREEDRKTGNPPFIKLSDPGISITVLPKD

SEQ ID NO: 3885 - protein, 558 aa, Homo sapiens
MAQSVLVPPGPDSFRFFTRESLAAIEQRIAEEKAKRPKQERKDEDDENGPKPNSDLEAGKSLPFIYGDIPPEMVSVPLEDLDPYYINKKTFIVLNKGKAISRFSATPALYILTPFNPIRKLAIKILVHSLFNMLIMCTILTNCVFMTMSNPPDWTKNVEYVTEFVDLGNVSALRTFRVLRALKTISVIPGLKTIVGALIQSVKKLSDVMILTVFCLSVFALIGLQLFMGNLRNKCLQWPPDNSSFEINITSFFNNSLDGNGTTFNRTVSIFNWDEYIEDKSHFYFLEGQNDALLCGNSSDAGQCPEGYICVKAGRNPNYGYTSFDTFSWAFLSLFRLMTQDFWENLYQLTLRAAGKTYMIFFVLVIFLGSFYLINLILAVVAMAYEEQNQATLEEAEQKEAEFQQMLEQLKKQQEEAQAAAAAASAESRDFSGAGGIGVFSESSSVASKLSSKSEKELKNRRKKKKQKEQSGEEEKNDRVRKSESEDSIRRKGFRFSLEGSRLTYEKRFSSPHQVTLMQEVGSLGLQQLHPCHFAGYSFPPDYFHGLALNVCGFSSPY

SEQ ID NO: 3886 - protein, 1266 aa, Homo sapiens
MASVKVAVRVRPMNRREKDLEAKFIIQMEKSKTTITNLKIPEGGTGDSGRERTKTFTYDFSFYSADTKSPDYVSQEMVFKTLGTDVVKSAFEGYNACVFAYGQTGSGKSYTMMGNSGDSGLIPRICEGLFSRINETTRWDEASFRTEVSYLEIYNERVRDLLRRKSSKTFNLRVREHPKEGPYVEDLSKHLVQNYGDVEELMDAGNINRTTAATGMNDVSSRSHAIFTIKFTQAKFDSEMPCETVSKIHLVDLAGSERADATGATGVRLKEGGNINKSLVTLGNVISALADLSQDAANTLAKKKQVFVPYRDSVLTWLLKDSLGGNSKTIMIATISPADVNYGETLSTLRYANRAKNIINKPTINEDANVKLIRELRAEIARLKTLLAQGNQIALLDSPTALSMEEKLQQNEARVQELTKEWTNKWNETQNILKEQTLALRKEGIGVVLDSELPHLIGIDDDLLSTGIILYHLKEGQTYVGRDDASTEQDIVLHGLDLESEHCIFENIGGTVTLIPLSGSQCSVNGVQIVEATHLNQGAVILLGRTNMFRFNHPKEAAKLREKRKSGLLSSFSLSMTDLSKSRENLSAVMLYNPGLEFERQQREELEKLESKRKLIEEMEEKQKSDKAELERMQQEVETQRKETEIVQLQIRKQEESLKRRSFHIENKLKDLLAEKEKFEEERLREQQEIELQKKRQEEETFLRVQEELQRLKELNNNEKAEKFQIFQELDQLQKEKDEQYAKLELEKKRLEEQEKEQVMLVAHLEEQLREKQEMIQLLRRGEVQWVEEEKRDLEGIRESLLRVKEARAGGDEDGEELEKAQLRFFEFKRRQLVKLVNLEKDLVQQKDILKKEVQEEQEILECLKCEHDKESRLLEKHDESVTDVTEVPQDFEKIKPVEYRLQYKERQLQYLLQNHLPTLLEEKQRAFEILDRGPLSLDNTLYQVEKEMEEKEEQLAQYQANANQLQKLQATFEFTANIARQEEKVRKKEKEILESREKQQREALERALARLERRHSALQRHSTLGMEIEEQRQKLASLNSGSREQSGLQASLEAEQEALEKDQERINAYIEEEVQRRLQDLHRVISEGCSTSADTMKDNEKLHNGTIQRKLKYERMVSRSLGANPDDLKDPIKISIPRYVLCGQGKDAHFEFEVKITVLDETWTVFRRYSRFREMHKTLKLKYAELAALEFPPKKLFGNKDERVIAERRSHLEKYLRDFFSVMLQSATSPLHINKVGLTLSKHTICEFSPFFKKGVFDYSSHGTG

SEQ ID NO: 3887 - protein, 1249 aa, Homo sapiens
MRYKKYIGILEAAVGITPLNKRELLPESRRHVNLWQQPGVRSTTLLSSPCEWDWHPGCSSRSKYSRKHRAVPVHGPRCQAPGMEELIWEQYTVTLQKDSKRGFGIAVSGGRDNPHFENGETSIVISDVLPGGPADGLLQENDRVVMVNGTPMEDVLHSFAVQQLRKSGKVAAIVVKRPRKVQVAALQASPPLDQDDRAFEVMDEFDGRSFRSGYSERSRLNSHGGRSRSWEDSPERGRPHERARSRERDLSRDRSRGRSLERGLDQDHARTRDRSRGRSLERGLDHDFGPSRDRDRDRSRGRSIDQDYERAYHRAYDPDYERAYSPEYRRGARHDARSRGPRSRSREHPHSRSPSPEPRGRPGPIGVLLMKSRANEEYGLRLGSQIFVKEMTRTGLATKDGNLHEGDIILKINGTVTENMSLTDARKLIEKSRGKLQLVVLRDSQQTLINIPSLNDSDSEIEDISEIESNRSFSPEERRHQYSDYDYHSSSEKLKERPSSREDTPSRLSRMGATPTPFKSTGDIAGTVVPETNKEPRYQEDPPAPQPKAAPRTFLRPSPEDEAIYGPNTKMVRFKKGDSVGLRLAGGNDVGIFVAGIQEGTSAEQEGLQEGDQILKVNTQDFRGLVREDAVLYLLEIPKGEMVTILAQSRADVYRDILACGRGDSFFIRSHFECEKETPQSLAFTRGEVFRVVDTLYDGKLGNWLAVRIGNELEKGLIPNKSRAEQMASVQNAQRDNAGDRADFWRMRGQRSGVKKNLRKSREDLTAVVSVSTKFPAYERVLLREAGFKRPVVLFGPIADIAMEKLANELPDWFQTAKTEPKDAGSEKSTGVVRLNTVRQIIEQDKHALLDVTPKAVDLLNYTQWFPIVIFFNPDSRQGVKTMRQRLNPTSNKSSRKLFDQANKLKKTCAHLFTATINLNSANDSWFGSLKDTIQHQQGEAVWVSEGKMEGMDDDPEDRMSYLTAMGADYLSCDSRLISDFEDTDGEGGAYTDNELDEPAEEPLVSSITRSSEPVQHEESIRKPSPEPRAQMRRAASSDQLRDNSPPPAFKPEPPKAKTQNKEESYDFSKSYEYKSNPSAVAGNETPGASTKGYPPPVAAKPTFGRSILKPSTPIPPQEGEEVGESSEEQDNAPKSVLGKVKIFEKMDHKARLQRMQELQEAQNARIEIAQKHPDIYAVPIKTHKPDPGTPQHTSSRPPEPQKAPSRPYQDTRGSYGSDAEEEEYRQQLSEHSKRGYYGQSARYRDTEL

SEQ ID NO: 3888 - protein, 92 aa, Homo sapiens
MAQSVLVPPGPDSFRFFTRESLAAIEQRIAEEKAKRPKQERKDEDDENGPKPNSDLEAGKSLPFIYGDIPPEMVSVPLEDLDPYYINKKVSS

SEQ ID NO: 3889 - protein, 421 aa, Homo sapiens
MKRTPTAEEREREAKKLRLLEELEDTWLPYLTPKDDEFYQQWQLKYPKLILREASSVSEELHKEVQEAFLTLHKHGCLFRDLVRIQGKDLLTPVSRILIGNPGCTYKYLNTRLFTVPWPVKGSNIKHTEAEIAAACETFLKLNDYLQIETIQALEELAAKEKANEDAVPLCMSADFPRVGMGSSYNGQDEVDIKSRAAYNVTLLNFMDPQKMPYLKEEPYFGMGKMAVSWHHDENLVDRSAVAVYSYSCEGPEEESEDDSHLEGRDPDIWHVGFKISWDIETPGLAIPLHQGDCYFMLDDLNATHQHCVLAGSQPRFSSTHRVAECSTGTLDYILQRCQLALQNVCDDVDNDDVSLKSFEPAVLKQGEEIHNEVEFEWLRQFWFQGNRYRKCTDWWCQPMAQLEALWKKMEGVNLLLVKIL

SEQ ID NO: 3890 - protein, 481 aa, Homo sapiens
MKRTPTAEEREREAKKLRLLEELEDTWLPYLTPKDDEFYQQWQLKYPKLILREASSVSEELHKEVQEAFLTLHKHGCLFRDLVRIQGKDLLTPVSRILIGNPGCTYKYLNTRLFTVPWPVKGSNIKHTEAEIAAACETFLKLNDYLQIETIQALEELAAKEKANEDAVPLCMSADFPRVGMGSSYNGQDEVDIKSRAAYNVTLLNFMDPQKMPYLKEEPYFGMGKMAVSWHHDENLVDRSAVAVYSYSCEGPEEESEDDSHLEGRDPDIWHVGFKISWDIETPGLAIPLHQGDCYFMLDDLNATHQHCVLAGSQPRFSSTHRVAECSTGTLDYILQRCQLALQNVCDDVDNDDVSLKSFEPAVLKQGEEIHNEVEFEWLRQFWFQGNRYRKCTDWWCQPMAQLEALWKKMEGVTNAVLHEVKREGLPVEQRNEILTAILASLTARQNLRREWHARKMDQFTDSSRENASPISSLAAWNITV

SEQ ID NO: 3891 - protein, 1454 aa, Homo sapiens
MASPRKVTEKRHNPVESICRKIRAIHKREAISNPIQQIIKYQSSSFDSPQTNTKKYFEEVLRKMTAACVPTPGSHWSSSEEVDAFISSPQIISPRTPSTSHLSSPETATYSVILTSSENVSKPKSQSNKNYTSLMSQIRKAEFFSNKDLNNYCSENNFSTLTLDFDSTFVQSLKCFDPQDSVVKKLSLNEDGWKQEADDGKEDVIYSINRACKEEALTSIFNACDIKRKELICSSFSKGSVGVAKIINFLRQTTSQNSEDSGLEQLWNMLDPEKRDPHVDLETFQAMMKDWMAYCGNTWEGVNHRLSSIIDDSVCEQDGIKSDGTMKMSTDITDSTLGSFEALGGETSKGVLEVSDLIAYVADLHFNKRKLEEENNKFKLALETLEETNSQLSEDCTELRLQVKSAHQAIMRTNLLKEELEELKLSMNASEEQKSMIVAQSKQLETENRALILKIRILQEENFKNIMDIDRLEKKIEDLSKTETEHQMQLHTYENTLLNKDTSLQKKGLYIEELKSTIIEYGSIIENLRGEKSKLAHELQHLQQALITNGIQLNVNGECNSIISEGEKSLHYELTLAQSAENTETERQHNVINLSSLDAMMDQEMLLLLREPAQKAVEFTATLQKLHEEISKIATLIENSRRWVTNPEITVKEKWEEQLTEFNNIMEEKLDLCILMLNILGNHKESLDKEFAKLIEILKRFRQEYFYFRKEFLASQKQLEAIKQLQEDAVNQEGILRKRLQETSQRLEDVEEQGKDRDREAHTASEKATSLLHKLEEAISEQRNLQTINTELSNTCQALQQKTRKLKTTIESLQKEFIEGEHHGLLFQSFLDEEFPHYDSLSCADAIQQPLQEKLQCCHKLYGGQEARIHQTPLTLKHTCWYTPLLDALSLDSFTAVPTLESTPFSGVANQIHTLCERPTYGEVKDGALDVKRQHKCPGPTSGPSPGTNLSGCIRMNDDPSMEENGVERVCPESLLQSREYSSLPLPRHTSSTDGTITSSDPGLEILNMASCDLDRNSLCKKEEDTRSASPTIEAQGTSPAHDNIAFQDSTSKDKTILNLEAKEEPETIEEHKKEHASGDSVVSPLPVTTVKSVNLRQSENTSANEKEVEAEFLRLSLGFKCDWFTLEKRVKLEERSRDLAEENLKKEITNCLKLLESLTPLCEDDNQAQEIIKKLEKSIKFLSQCAARVASRAEMLGAINQESRVSKAVEVMIQHVENLKRMYAKEHAELEELKQVLLQNERSFNPLEDDDDCQIKKRSASLNSKPSSLRRVTIASLPRNIGNAGMVAGMENNDRFSRRSSSWRILGSKQSEHRPSLPRFISTYSWADAEEEKCELKTKDDSEPSGEETVERTRKPSLSEKKNNPSKWDVSSVYDTIASWATNLKSSIRKANKALWLSIAFIVLFAALMSFLTGQLFQKSVDAAPTQQEDSWTSLEHILWPFTRLRHNGPPPV

SEQ ID NO: 3892 - protein, 540 aa, Homo sapiens
MLAEWGACLLLAVALLGPGLQAQAMEGVKCGGVLSAPSGNFSSPNFPRLYPYNTECSWLIVVAEGSSVLLTFHAFDLEYHDTCSFDFLEIYNGASPDKGNLLGRFCGKVPPPPFTSSWHVMSVIFHSDKHVASHGFSAGYQKDVCGGVLTGLSGVLTSPEYPNNYPNSMECHWVIRAAGPAHVKLVFVDFQVEGNEECTYDYVAVLGGPGPTRGHHYCGSTRPPTLVSLGHELQVVFKSDFNIGGRGFKAYYFSGECQEVYMAMRGNFSSPQYPSSYPNNIRCHWTIRLPPGYQVKVFFLDLDLEEPNSLTKTCDFDHLAAFDGASEEAPLLGNWCGHHLPPPVTSSHNQLLLLLHTDRSTTRRGFSVAYIGVVPMNVSCSRTDFQILISTQALAPLERTKVYLGSRSCAAQEVGGNLRIQARFDTCGTESQRRNNTSVIVSVLYIDFSAAGREDIHEYEVRCEPRRKEASVHLLSGSHWLGPYAATAEHLQEAPPMDEAEALEGPVSMVAQDTSDIVFLGLCILAGILMVIAIVVLMLL

SEQ ID NO: 3893 - protein, 248 aa, Homo sapiens
MDPGAGSETSLTVNEQVIVMSGHETIRVLEVGVDAQLPAEEESKGLEGVAAEGSQSGDPAEASQAAGEAGPDNLGSSAEATVKSPPGIPPSPATAIATFSQAPSQPQASQTLTPLAVQAAPQYCRSSGWSAGAGRVDNSYSNCGCPPRTDRCFSYGGSVQATFSRSPSSCCAEHRSSGTGTSCRTSTGLLDGPTPATSPAPDAVPDPAAAADHTCHPPAAHCCHRCCPYPQASGHPPTDHRPACRLRI

SEQ ID NO: 3894 - protein, 450 aa, Homo sapiens
MELAGCPWKKLRLLEELEDTWLPYLTPKDDEFYQQWQLKYPKLILREASSVSEELHKEVQEAFLTLHKHGCLFRDLVRIQGKDLLTPVSRILIGNPGCTYKYLNTRLFTVPWPVKGSNIKHTEAEIAAACETFLKLNDYLQIETIQALEELAAKEKANEDAVPLCMSADFPRVGMGSSYNGQDEVDIKSRAAYNVTLLNFMDPQKMPYLKEEPYFGMGKMAVSWHHDENLVDRSAVAVYSYSCEGPEEESEDDSHLEGRDPDIWHVGFKISWDIETPGLAIPLHQGDCYFMLDDLNATHQHCVLAGSQPRFSSTHRVAECSTGTLDYILQRCQLALQNVCDDVDNDDVSLKSFEPAVLKQGEEIHNEVEFEWLRQFWFQGNRYRKCTDWWCQPMAQLEALWKKMEGVTNAVLHEVKREGLPVEQRNEILTAILASLTARQNLRREWHASV

SEQ ID NO: 3895 - protein, 323 aa, Homo sapiens
ETLEKESASLADRLIQGQVTRAQEAEENYLIKRELATIKQQSDEASAKLEQAENTIRKLQHQQQWHKCSSNYNEDFVLQLEKELVQARLSEAESQCALKEMQDKVLDIEKRNNSLPDENNIARLQEELIAVKLREAEAIMGLKELRQQVKDLEEHWQRHLARTTGRWKDPPKKNAMNELQDELMTIRLREAETQAEIREIKQRMMEMETQNQINSNHLRRAEQEVISLQEKVQYLSAQNKGLLTQLSEAKRKQAEIECKNKEEVMAVRLREADSIAAVAELRQHIAELEIQKEEGKLQGQLNKSDSNQYIGELKDQIAELNHE

SEQ ID NO: 3896 - protein, 1792 aa, Homo sapiens
MARCGEGSAAPMVLLGSAGVCSKGLQRKGPCERRRLKATVSEQLSQDLLRLLREEFHTDVTFSVGCTLFKAHKAVLLARVPDFYFHTIGQTSNSLTNQEPIAVENVEALEFRTFLQIIYSSNRNIKNYEEEILRKKIMEIGISQKQLDISFPKCENSSDCSLQKHEIPEDISDRDDDFISNDNYDLEPASELGEDLLKLYVKPCCPDIDIFVDGKRFKAHRAILSARSSYFAAMLSGCWAESSQEYVTLQGISHVELNVMMHFIYGGTLDIPDKTNVGQILNMADMYGLEGLKEVAIYILRRDYCNFFQKPVPRTLTSILECLIIAHSVGVESLFADCMKWIVKHFARFWSERSFANIPPEIQKSCLNMLIQSLNDKNAAFLLMESDRLIISLPRVKWTEAALTMASQLQEKCIAFIVDNFSKIIQSENFALLLQSQAMSSTADLLDTILKAIEENITTENSCSLLMALDTLLNSDSTKEMGFTCKIQALRDKLWIFLVQSFYAVRHTESWKLMSTDDQQKIQAAAFDKGDDRRLGKKPIFSSSQQRKQVSDSGDIKIKSWRGNNKKECWSYLSTNKKMKSDGLGASGHSSSTNRNSINKTLKQDDVKEKDGTKIASKITKELKTGGKNVSGKPKTVTKSKTENGDKARLENMSPRQVVERSATAAAAATGQKNLLNGKGVRNQEGQISGARPKVLTGNLNVQAKAKPLKKATGKDSPCLSIAGPSSRSTDSSMEFSISTECLDEPKENGSTEEEKPSGHKLSFCDSPGQMMKNSVDSVKNSTVAIKSRPVSRVTNGTSNKKSIHEQDTNVNNSVLKKVSGKGCSEPVPQAILKKRGTSNGCTAAQQRTKSTPSNLTKTQGSQGESPNSVKSSVSSRQSDENVAKLDHNTTTEKQAPKRKMVKQVHTALPKVNAKIVAMPKNLNQSKKGETLNNKDSKQKMPPGQVISKTQPSSQRPLKHETSTVQKSMFHDVRDNNNKDSVSEQKPHKPLINLASEISDAEALQSSCRPDPQKPLNDQEKEKLALECQNISKLDKSLKHELESKQICLDKSETKFPNHKETDDCDAANICCHSVGSDNVNSKFYSTTALKYMVSNPNENSLNSNPVCDLDSTSAGQIHLISDRENQVGRKDTNKQSSIKCVEDVSLCNPERTNGTLNSAQEDKKSKVPVEGLTIPSKLSDESAMDEDKHATADSDVSSKCFSGQLSEKNSPKNMETSESPESHETPETPFVGHWNLSTGVLHQRESPESDTGSATTSSDDIKPRSEDYDAGGSQDDDGSNDRGISKCGTMLCHDFLGRSSSDTSTPEELKIYDSNLRIEVKMKKQSNNDLFQVNSTSDDEIPRKRPEIWSRSAIVHSRERENIPRGSVQFAQEIDQVSSSADETEDERSEAENVAENFSISNPAPQQFQGIINLAFEDATENECREFSATKKFKRSVLLSVDECEELGSDEGEVHTPFQASVDSFSPSDVFDGISHEHHGRTCYSRFSRESEDNILECKQNKGNSVCKNESTVLDLSSIDSSRKNKQSVSATEKKNTIDVLSSRSRQLLREDKKVNNGSNVENDIQQRSKFLDSDVKSQERPCHLDLHQREPNSDIPKNSSTKSLDSFRSQVLPQEGPVKESHSTTTEKANIALSAGDIDDCDTLAQTRMYDHRPSKTLSPIYEMDVIEAFEQKVESETHVTDMDFEDDQHFAKQDWTLLKQLLSEQDSNLDVTNSVPEDLSLAQYLINQTLLLARDSSKPQGITHIDTLNRWSELTSPLDSSASITMASFSSEDCSPQGEWTILELETQH

SEQ ID NO: 3897 - protein, 698 aa, Homo sapiens
MAEPQAESEPLLGGARGGGGDWPAGLTTYRSIQVGPGAAARWDLCIDQAVVFIEDAIQYRSINHRVDASSMWLYRRYYSNVCQRTLSFTIFLILFLAFIETPSSLTSTADVRYRAAPWEPPCGLTESVEVLCLLVFAADLSVKGYLFGWAHFQKNLWLLGYLVVLVVSLVDWTVSLSLVCHEPLRIRRLLRPFFLLQNSSMMKKTLKCIRWSLPEMASVGLLLAIHLCLFTMFGMLLFAGGKQDDGQDRERLTYFQNLPESLTSLLVLLTTANNPDVMIPAYSKNRAYAIFFIVFTVIGSLFLMNLLTAIIYSQFRGYLMKSLQTSLFRRRLGTRAAFEVLSSMVGEGGAFPQAVGVKPQNLLQVLQKVQLDSSHKQAMMEKVRSYGSVLLSAEEFQKLFNELDRSVVKEHPPRPEYQSPFLQSAQFLFGHYYFDYLGNLIALANLVSICVFLVLDADVLPAERDDFILGILNCVFIVYYLLEMLLKVFALGLRGYLSYPSNVFDGLLTVVLLVLEISTLAVYRLPHPGWRPEMVGLLSLWDMTRMLNMLIVFRFLRIIPSMKLMAVVASTVLGLVQNMRAFGGILVVVYYVFAIIGINLFRGVIVALPGNSSLAPANGSAPCGSFEQLEYWANNFDDFAAALVTLWNLMVVNNWQVFLDAYRRYSGPDPGGSHVESPEQHQLLTMLLTVVDRLSMPR

SEQ ID NO: 3898 - protein, 453 aa, Homo sapiens
TGGRIVEGLKFPNEFDELEIQGKLPDPVKEYGCAPWPMVEKLIKQCLKENPQERPTSAQVFDILNSAELVCLTRRILLPKNVIVECMVATHHNSRNASIWLGCGHTDRGQLSFLDLNTEGYTSEEVADSRILCLALVHLPVEKESWIVSGTQSGTLLVINTEDGKKRHTLEKMTDSVTCLYCNSFSKQSKQKNFLLVGTADGKLAIFEDKTVKLKGAAPLKILNIGNVSTPLMCLSESTNSTERNVMWGGCGTKIFSFSNDFTIQKLIETRTSQLFSYAAFSDSNIITVVVDTALYIAKQNSPVVEVWDKKTEKLCGLIDCVHFLREVMVKENKESKHKMSYSGRVKTLCLQKNTALWIGTGGGHILLLDLSTRRLIRVIYNFCNSVRVMMTAQLGSLKNVMLVLGYNRKNTEEIQSCLTVWDINLPHEVQNLEKHIEVRKELAEKMRRTSVE

SEQ ID NO: 3899 - protein, 474 aa, Homo sapiens
GSASAPTLFPLVSCENSPSDTSSVAVGCLAQDFLPDSITFSWKYKNNSDISSTRGFPSVLRGGKYAATSQVLLPSKDVMQGTDEHVVCKVQHPNGNKEKNVPLPVIAELPPKVSVFVPPRDGFFGNPRKSKLICQATGFSPRQIQVSWLREGKQVGSGVTTDQVQAEAKESGPTTYKVTSTLTIKESDWLGQSMFTCRVDHRGLTFQQNASSMCVPDQDTAIRVFAIPPSFASIFLTKSTKLTCLVTDLTTYDSVTISWTRQNGEAVKTHTNISESHPNATFSAVGEASICEDDWNSGERFTCTVTHTDLPSPLKQTISRPKGVALHRPDVYLLPPAREQLNLRESATITCLVTGFSPADVFVQWMQRGQPLSPEKYVTSAPMPEPQAPGRYFAHSILTVSEEEWNTGETYTCVVAHEALPNRVTERTVDKSTEGEVSADEEGFENLWATASTFIVLFLLSLFYSTTVTLFKVK

SEQ ID NO: 3900 - protein, 426 aa, Homo sapiens
MEESKQLQIHLDDIVIPSAAVISRAETINATVPKTIIYWDSQTTIEKVSCEMRYKATTNQTWNVKEFDTNFTYVQQSEFYLEPNIKYVFQVRCQETGKRYWQPWSSLFFHKTPETVPQVTSKAFQHDTWNSGLTVASISTGHLTSDNRGDIGLLLGMIVFAVMLSILSLIGIFNRSFRTGIKRRILLLIPKWLYEDIPNMKNSNVVKMLQENSELMNNNSSEQVLYVDPMITEIKEIFIPEHKPTDYKKENTGPLETRDYPQNSLFDNTTVVYIPDLNTGYKPQISNFLPEGSHLSNNNEITSLTLKPPVDSLDSGNNPRLQKHPNFAFSVSSVNSLSNTIFLGELSLILNQGECSSPDIQNSVEEETTMLLENDSPSETIPEQTLLPDEFVSCLGIVNEELPSINTYFPQNILESHFNRISLLEK

SEQ ID NO: 3901 - protein, 1460 aa, Homo sapiens
MDTVLVLLLGLQALAGPSPKPQKDSVSDWAIVLITLTLVAAIVSLMYGIKKACQFRREMSLGCGCGSVTPYSSHHEGEAASQRYSCQMKASWGAGATTFQEYQKTGELSTSDHIFPLTPGLVYSIPFDHIVLHSGQRPPELPKSTEIHEQKRHCNTTRHSKPTDKPTGNSKTIDHKSSTDNHEAPPTSEENSSNQGKDPMIRNQRSVDPADSTTTHKESAGKKHITPAPKSKINCRKSTTGKSTVTRKSDKTGRPLEKSMSTLDKTSTSSHKTTTSFHNSGNSQTKQKSTSFPEKITAASKTTYKTTGTPEESEKTEDSRTTVASDKLLTKTTKNIQETISANELTQSLAEPTEHGGRTANENNTPSPAEPTENRERTANENTTLSPAEPIENRERTANENTAPFPAGPTENREMTANENTTLFPAEPTEHGERTANENTTPSPAEPTEHGERTANENTTPSPAEPTEHGERTPFANDKTTSSSAESTEHGERTPLANENTTPSPAEPTENRERTANENTTPSPAGPTENRETTANEKTTLSPVEPTENRETTANEKTTPSPAEPTENGQRTPFANEKTTSSSAEPTEHGERTPLANENTTPSPAEPTENRERTANEKTTPSPAEPTENGDRTPLANEKTTPSLAEPTENGQRTPFANEKTTSSSAEPTEHEERTPLANENTTPSPAEPTENRERTANENTTPSPAGPTENREMTANEKTTLFPAEPTENRERTANEKTTSSPAEPTENGQRTPFANEKTTSSSAEPTEHGERTPLANENTTLSPAEPTENRERTANEKTTPFPAEPTENRERTANENTTPSPAQPTENGDRTPLANEKTTPSLAEPTENGKRTPFANEKTTSSSAEPTEHAERTPLANENTTSSPAEPTENRERTANEKTTQFPAEPTENRESTANEKTTPFPAEPTENREWTANENTTLSPAEPTEHEEMTPLANEKTTLSPAEPTENGERTPFTNEKTTPSSAEPTEHGERTPLANEITTPSRAEPTEHGERIANEKATPSPAKPTEHGETTVNEDTTPSSAEPTENGERTPLANENTTTSPTESTEHGERTANEKTTPSPAEPTEHGERTPSANEKTIPSPAKPTEHEEMTPSANENTTPSPVKPTEHGEKTTLANEKITLSPEGPTEHGAKTTSANEKITPSLAKPTEHGERTTSPNDKITSSAAESTEHRDRATSANVITPAPAEPIKHAKRTTLAHEKMTQVTEKSTEHPEKTTSTTEKTTRTPEKPTLYSEKTICTKGKNTPVPEKPTENLGNTTLTTETIKAPVKSTENPEKTAAVTKTIKPSVKVTGDKSLTTTSSHLNKTEVTHQVPTGSFTLITSRTKLSSITSEATGNESHPYLNKDGSQKGIHAGQMGENDSFPAWAIVIVVLVAVILLLVFLGLIFLVSYMMRTRRTLTQNTQYNDAEDEGGPNSYPVYLMEQQNLGMGQIPSPR

SEQ ID NO: 3902 - protein, 283 aa, Homo sapiens
MARCGEGSAAPMVLLGSAGVCSKGLQRKGPCERRRLKATVSEQLSQDLLRLLREEFHTDVTFSVGCTLFKAHKAVLLARVPDFYFHTIGQTSNSLTNQEPIAVENVEALEFRTFLQIIYSSNRNIKNYEEEILRKKIMEIGISQKQLDISFPKCENSSDCSLQKHEIPEDISDRDDDFISNDNYDLEPASELGEDLLKLYVKPCCPDIDIFVDGKRFKAHRAILSARSSYFAAMLSGCWAESSQEYVTLQGISHVELNVMMHFIYGGTLDIPDKTNVGLFPEH

SEQ ID NO: 3903 - protein, 276 aa, Homo sapiens
MESALPAAGFLYWVGAGTVAYLALRISYSLFTALRVWGVGNEAGVGPGLGEWAVVTGSTDGIGKSYAEELAKHGMKVVLISRSKDKLDQVSSEIMNNVGMSYEYPEYFLDVPDLDNVIKKMININILSVCKMTQLVLPGMVERSKGAILNISSGSGMLPVPLLTIYSATKTFVDFFSQCLHEEYRSKGVFVQSVLPYFVATKLAKIRKPTLDKPSPETFVKSAIKTVGLQSRTNGYLIHALMGSIISNLPSWIYLKIVMNMNKSTRAHYLKKTKKN

SEQ ID NO: 3904 - protein, 455 aa, Homo sapiens
MKRTPTAEEREREAKKLRLLEELEDTWLPYLTPKDDEFYQQWQLKYPKLILREASSVSEELHKEVQEAFLTLHKHGCLFRDLVRIQGKDLLTPVSRILIGNPGCTYKYLNTRLFTVPWPVKGSNIKHTEAEIAAACETFLKLNDYLQIETIQALEELAAKEKANEDAVPLCMSADFPRVGMGSSYNGQDEVDIKSRAAYNVTLLNFMDPQKMPYLKEEPYFGMGKMAVSWHHDENLVDRSAVAVYSYSCEGPEEESEDDSHLEGRDPDIWHVGFKISWDIETPGLAIPLHQGDCYFMLDDLNATHQHCVLAGSQPRFSSTHRVAECSTGTLDYILQRCQLALQNVCDDVDNDDVSLKSFEPAVLKQGEEIHNEVEFEWLRQFWFQGNRYRKCTDWWCQPMAQLEALWKKMEGVTNAVLHEVKREGLPVEQRNEILTAILASLTARQNLRREWHAS

SEQ ID NO: 3905 - protein, 559 aa, Homo sapiens
MKRTPTAEEREREAKKLRLLEELEDTWLPYLTPKDDEFYQQWQLKYPKLILREASSVSEELHKEVQEAFLTLHKHGCLFRDLVRIQGKDLLTPVSRILIGNPGCTYKYLNTRLFTVPWPVKGSNIKHTEAEIAAACETFLKLNDYLQIETIQALEELAAKEKANEDAVPLCMSADFPRVGMGSSYNGQDEVDIKSRAAYNVTLLNFMDPQKMPYLKEEPYFGMGKMAVSWHHDENLVDRSAVAVYSYSCEGPEEESEDDSHLEGRDPDIWHVGFKISWDIETPGLAIPLHQGDCYFMLDDLNATHQHCVLAGSQPRFSSTHRVAECSTGTLDYILQRCQLALQNVCDDVDNDDVSLKSFEPAVLKQGEEIHNEVEFEWLRQFWFQGNRYRKCTDWWCQPMAQLEALWKKMEGVTNAVLHEVKREGLPVEQRNEILTAILASLTARQNLRREWHARCQSRIARTLPADQKPECRPYWEKDDASMPLPFDLTDIVSELREYQSTINTVLPGGISCFKFASQICCRVKSHYVAQAGLEFLASNSWPQAILLPQPPKALGLQV

SEQ ID NO: 3906 - protein, 79 aa, Homo sapiens
MLLGSLWGRCHPGRCALFLILALLLDAVGLVLLLLGILAPLSSWDFFIYTGALILALSLLLWIIWYSLNIEVSPEKLDL

SEQ ID NO: 3907 - protein, 371 aa, Homo sapiens
KVRSYGSVLLSAEEFQKLFNELDRSVVKEHPPRPEYQSPFLQSAQFLFGHYYFDYLGNLIALANLVSICVFLVLDADVLPAERDDFILGILNCVFIVYYLLEMLLKVFALGLRGYLSYPSNVFDGLLTVVLLVLEISTLAVYRLPHPGWRPEMVGLLSLWDMTRMLNMLIVFRFLRIIPSMKLMAVVASTVLGLVQNMRAFGGILVVVYYVFAIIGINLFRGVIVALPGNSSLAPANGSAPCGSFEQLEYWANNFDDFAAALVTLWNLMVVNNWQVFLDAYRRYSGPWSKIYFVLWWLVSSVIWVNLFLALILENFLHKWDPRSHLQPLAGTPEATYQMTVELLFRDILEEPGEDELTERLSQHPHLWLCR

SEQ ID NO: 3908 - protein, 1148 aa, Homo sapiens
MAPKTKKGCKGSIDDFLGDLLGDDMTLPEKPVKLASHTRDTTGVSQMFPSSKARTKSLLGDDVFSTMAGLEEADAEVSGISEADPQALLQAMKDLDGMDADILGLKKSNSAPSKKAAKDPGKGELPNHPKPAGGAIPTKKSLPSPSSSGHQNRRFSSEDLEDPLRGLLSYDEGGITKQPPVTQSKTASDKSPSTVRDQGPSIPLTPGDTPIRKKEELLFDDGDDIMATLGFGDSPKAEKRQIGDQEGPRPARSTLDELLGRGMATKLLARPGTGEHREFKLDKKYQRPQDSEDMWGDEDFTFGAYQPTVVSSEGRQSRRQSVSRFFADSGADPKGEPGSKQSPPMASSPIQPRKGGADWLGLKDEDLDLFPASPTREAHRESSVPVTPSVPPPASQHSTPAGLPPSRAKPPTEGAGSPAKASQASKLRASKEEKEDWLSHALSRKKSQGLAREQHAGTSEGLHLAGTAGHPPSGSQPLTSTQGLEHAAAGGSSGTTARERPCVRPGVSGSPVTQNHAASALPTGSPKRGTAPGDLSATEPATCFPSTQKPTEPSVPVQPLLPESLARSLLPSTEYQKQLLAAQVQLQCSPAELQAELLHSQARLAELEAQVRKLELERAQHELLLGSLQQQHQADLELIESAHRSRIKVLETSYQQREERLRRENEELSARYLSQCQEAEQARAELTAQHQRRLAAIAQEKDQEMERLRELQRASILDMRRDHEEQLQRLKLLKDREVDAATSATSHTRSLNSIIHQMEKFSSSLHELSSRVEASHLTTSQERELGIRQRDEQLRALQERLGQQQRDMEEERSRQQEVIGKMEARLNEQSRLLEQERWRVTAEQSKAESMQRALEEQRKVTAQQMAMERAELERAKSALLEEQKSVMLKCGEERRRLAAEWAEFSAQQKLSKERAEREAERALQVDTQREGTLISLAKEQAELKIRASELRAEEKQLAAERAALEQERQELRLEKERINATALRVKLRAEEVESMSKVASEKYEEGERALREAQQVQAEQQARLQAVQQQQERLRKQEQHMHQEHLSLAQQRLQLDRARQDLPSSLVGLFPRAQGPAASSQSALMPPAPTTRWCSQPPTGLDPSPLHLHARLALLRHMAEQDRDFLENEQFFLETLKKGSYNLTSHSA

SEQ ID NO: 3909 - protein, 204 aa, Homo sapiens
MAQPQGPAEGSLPTGDPSPSEGTPGTSQAPGSPAATRRRELLRELEAQVQAAYGQDRELRPEEIEELQVAFQEFDRDRDGYIGCRELGACMRTLGYMPTEMELIEISQQISGGKVDFEDFVELMGPKLLAETADMIGVRELRDAFREFDTNGDGRISVGELRAALKALLGERLSQREVDEILQDVDLNGDGLVDFEEFVRMMSR

SEQ ID NO: 3910 - protein, 731 aa, Homo sapiens
MAQSVLVPPGPDSFRFFTRESLAAIEQRIAEEKAKRPKQERKDEDDENGPKPNSDLEAGKSLPFIYGDIPPEMVSVPLEDLDPYYINKKTFIVLNKGKAISRFSATPALYILTPFNPIRKLAIKILVHSLFNMLIMCTILTNCVFMTMSNPPDWTKNVEYTFTGIYTFESLIKILARGFCLEDFTFLRDPWNWLDFTVITFAYVTEFVDLGNVSALRTFRVLRALKTISVIPGLKTIVGALIQSVKKLSDVMILTVFCLSVFALIGLQLFMGNLRNKCLQWPPDNSSFEINITSFFNNSLDGNGTTFNRTVSIFNWDEYIEDKSHFYFLEGQNDALLCGNSSDAGQCPEGYICVKAGRNPNYGYTSFDTFSWAFLSLFRLMTQDFWENLYQLTLRAAGKTYMIFFVLVIFLGSFYLINLILAVVAMAYEEQNQATLEEAEQKEAEFQQMLEQLKKQQEEAQAAAAAASAESRDFSGAGGIGVFSESSSVASKLSSKSEKELKNRRKKKKQKEQSGEEEKNDRVRKSESEDSIRRKGFRFSLEGSRLTYEKRFSSPHQSLLSIRGSLFSPRRNSRASLFSFRGRAKDIGSENDFADDEHSTFEDNDSRRDSLFVPHRHGERRHSNVSQASRASRVLPILPMNGKMHSAVDCNGVVSLVGGPSTLTSAGQLLPEGTTTETEIRKRRSSSYHVSMDLLEDPTSRQRAMSIASILTNTMEDFFFLYLASRKLLQM

SEQ ID NO: 3911 - protein, 730 aa, Homo sapiens
MAQSVLVPPGPDSFRFFTRESLAAIEQRIAEEKAKRPKQERKDEDDENGPKPNSDLEAGKSLPFIYGDIPPEMVSVPLEDLDPYYINKKTFIVLNKGKAISRFSATPALYILTPFNPIRKLAIKILVHSLFNMLIMCTILTNCVFMTMSNPPDWTKNVEYTFTGIYTFESLIKILARGFCLEDFTFLRDPWNWLDFTVITFAYVTEFVDLGNVSALRTFRVLRALKTISVIPGLKTIVGALIQSVKKLSDVMILTVFCLSVFALIGLQLFMGNLRNKCLQWPPDNSSFEINITSFFNNSLDGNGTTFNRTVSIFNWDEYIEDKSHFYFLEGQNDALLCGNSSDAGQCPEGYICVKAGRNPNYGYTSFDTFSWAFLSLFRLMTQDFWENLYQLTLRAAGKTYMIFFVLVIFLGSFYLINLILAVVAMAYEEQNQATLEEAEQKEAEFQQMLEQLKKQQEEAQAAAAAASAESRDFSGAGGIGVFSESSSVASKLSSKSEKELKNRRKKKKQKEQSGEEEKNDRVRKSESEDSIRRKGFRFSLEGSRLTYEKRFSSPHQSLLSIRGSLFSPRRNSRASLFSFRGRAKDIGSENDFADDEHSTFEDNDSRRDSLFVPHRHGERRHSNVSQASRASRVLPILPMNGKMHSAVDCNGVVSLVGGPSTLTSAGQLLPEGTTTETEIRKRRSSSYHVSMDLLEDPTSRQRAMSIASILTNTMEGKSFEDCLAFRSLP

SEQ ID NO: 3912 - protein, 204 aa, Homo sapiens
MDSQPSCVVVTGFGPFRQHLVNSSWEAVKELSKLGLGNETVVQLRTLELPVDYREAKRRVTGIWEDHQPQLVVHVGMDTAAKAIILEQSGKNQGYRDADIRSFWPEGGVCLPGSPDVLESGVCMKAVCKRVAVEGVDVIFSRDAGRYVCDYTYYLSLHHGKGCAALIHVPPLSRGLPASLLGRALRVIIQEMLEEVGKPKHRAQ

SEQ ID NO: 3913 - protein, 2358 aa, Homo sapiens
LQGPYSLNGYRVRVYRQDSATQWFTGIITHHDLFTRTMIVMNDQVLEPQNVDPSMVQMTFLDDVVHSLLKGENIGITSRRRSRANQNVNAVHSHYTRAQANSPRPAMNSQAAVPKQNTHQQQQQRSIRPNKRKGSDSSIPDEEKMKEEKYDYISRGENPKGKNKHLMNKRRKPEEDEKKLNMKRLRTDNVSDFSESSDSENSNKRIIDNSSEQKPENELKNKNTSKINGEEGKPHNNEKAGEETLKNSQPPWDQIQEDKKHEEAEKRKSVDTQLQEDMIIHSSEQSTVSDHNSNDLLPQECNMDKTHTMELLPKEKFVSRPPTPKCVIDITNDTNLEKVAQENSSTFGLQTLQKMDPNVSDSKHSIANAKFLETAKKDSDQSWVSDVVKVDLTQSSVTNASSGNDHLNMEKEKYVSYISPLSAVSVMEDKLHKRSPPPETIKSKLNTSVDTHKIKSSPSPEVVKPKITHSPDSVKSKATYVNSQATGERRLANKIEHELSRCSFHPIPTRSSTLETTKSPLIIDKNEHFTVYRDPALIGSETGANHISPFLSQHPFPLHSSSHRTCLNPGTHHPALTPAPHLLAGSSSQTPLPTINTHPLTSGPHHAVHHPHLLPTVLPGVPTASLLGGHPRLESAHASSLSHLALAHQQQQQLLQHQSPHLLGQAHPSASYNQLGLYPIIWQYPNGTHAYSGLGLPSSKWVHPENAVNAEASLRRNSPSPWLHQPTPVTSADGIGLLSHIPVRPSSAEPHRPLKITAHSSPPLTKTLVDHHKEELERKAFMEPLRSVASTSAKNDLDLNRSQTGKDCHLHRHFVDPVLNQLQRPPQETGERLNKYKEEHRRILQESIDVAPFTTKIKGLEGERENYSRVASSSSSPKSHIIKQDMDVERSVSDLYKMKHSVPQSLPQSNYFTTLSNSVVNEPPRSYPSKEVSNIYGDKQSNALAAAAANPQTLTSFITSLSKPPPLIKHQPESEGLVGKIPEHLPHQIASHSVTTFRNDCRSPTHLTVSSTNTLRSMPALHRAPVFHPPIHHSLERKEGSYSSLSPPTLTPVMPVNAGGKVQESQKPPTLIPEPKDSQANFKSSSEQSLTEMWRPNNNLSKEKTEWHVEKSSGKLQAAMASVIVRPSSSTKTDSMPAMQLASKDRVSERSSAGAHKTDCLKLAEAGETGRIILPNVNSDSVHTKSEKNFQAVSQGSVPSSVMSAVNTMCNTKTDVITSAADTTSVSSWGGSEVISSLSNTILASTSSECVSSKSVSQPVAQKQECKVSTTAPVTLASSKTGSVVQPSSGFSGTTDFIHLKKHKAALAAAQYKSSNASETEPNAIKNQTLSASLPLDSTVICSTINKANSVGNGQASQTSQPNYHTKLKKAWLTRHSEEDKNTNKMENSGNSVSEIIKPCSVNLIASTSSDIQNSVDSKIIVDKYVKDDKVNRRKAKRTYESGSESGDSDESESKSEQRTKRQPKPTYKKKQNDLQKRKGEIEEDLKPNGVLSRSAKERSKLKLQSNSNTGIPRSVLKDWRKVKKLKQTGESFLQDDSCCEIGPNLQKCRECRLIRSKKGEEPAHSPVFCRFYYFRRLSFSKNGVVRIDGFSSPDQYDDEAMSLWTHENFEDDELDIETSKYILDIIGDKFCQLVTSEKTALSWVKKDAKIAWKRAVRGVREMCDACEATLFNIHWVCQKCGFVVCLDCYKAKERKSSRDKELYAWMKCVKGQPHDHKHLMPTQIIPGSVLTDLLDAMHTLREKYGIKSHCHCTNKQNLQVGNFPTMNGVSQVLQNVLNHSNKISLCMPESQQQNTPPKSEKNGGSSPESDVGTDNKLTPPESQSPLHWLADLAEQKAREEKKENKELTLENQIKEEREQDNSESPNGRTSPLVSQNNEQGSTLRDLLTTTAGKLRVGSTDAGIAFAPVYSMGAPSSKSGRTMPNILDDIIASVVENKIPPSKTSKINVKPELKEEPEESIISAVDENNKLYSDIPHSWICEKHILWLKDYKNSSNWKLFKECWKQGQPAVVSGVHKKMNISLWKAESISLDFGDHQADLLNCKDSIISNANVKEFWDGFEEVSKRQKNKSGETVVLKLKDWPSGEDFKTMMPARYEDLLKSLPLPEYCNPEGKFNLASHLPGFFVRPDLGPRLCSAYGVVAAKDHDIGTTNLHIEVSDVVNILVYVGIAKGNGILSKAGILKKFEEEDLDDILRKRLKDSSEIPGALWHIYAGKDVDKIREFLQKISKEQGLEVLPEHDPIRDQSWYVNKKLRQRLLEEYGVRTCTLIQFLGDAIVLPAGALHQVQNFHSCIQVTEDFVSPEHLVESFHLTQELRLLKEEINYDDKLQVKNILYHAVKEMVRALKIHEDEVEDMEEN

SEQ ID NO: 3914 - protein, 363 aa, Homo sapiens
MLVMAPRTVLLLLSAALALTETWAGSHSMRYFYTSVSRPGRGEPRFISVGYVDDTQFVRFDSDAASPREEPRAPWIEQEGPEYWDRNTQIYKAQAQTDRESLRNLRGYYNQSEAGSHTLQSMYGCDVGPDGRLLRGHDQYAYDGKDYIALNEDLRSWTAADTAAQITQRKWEAAREAEQRRAYLEGECVEWLRRYLENGKDKLERADPPKTHVTHHPISDHEATLRCWALGFYPAEITLTWQRDGEDQTQDTELVETRPAGDRTFQKWAAVVVPSGEEQRYTCHVQHEGLPKPLTLRWEPSSQSTVPIVGIVAGLAVLAVVVIGAVVAAVMCRRKSSGRKGGSYSQAACSDSAQGSDVSLTAK

SEQ ID NO: 3915 - protein, 208 aa, Homo sapiens
DGAEPGRVDTFWYKFLKREPGGELSWEGNGPHHDRCCTYNENNLVDGVYCLPIGHWIEATGHTNEMKHTTDFYFNIAGHQAMHYSRILPNIWLGSCPRQVEHVTIKLKHELGITAVMNFQTEWDIVQNSSGCNRYPEPMTPDTMIKLYREEGLAYIWMPTPDMSTEDEKRTADMCCSGMWEETAGQILRGGRKWTKTNIQKGPMLWIL

SEQ ID NO: 3916 - protein, 63 aa, Homo sapiens
SLTCVTSSHWDRPYSREVAAFPLTESRSVAQAGVQWHDPGFTPFSYLSLPLGLQAPATMPGPS

SEQ ID NO: 3917 - protein, 1078 aa, Homo sapiens
MAFYSCCWVLLALTWHTSAYGPDQRAQKKGDIILGGLFPIHFGVAAKDQDLKSRPESVECIRYNFRGFRWLQAMIFAIEEINSSPALLPNLTLGYRIFDTCNTVSKALEATLSFVAQNKIDSLNLDEFCNCSEHIPSTIAVVGATGSGVSTAVANLLGLFYIPQVSYASSSRLLSNKNQFKSFLRTIPNDEHQATAMADIIEYFRWNWVGTIAADDDYGRPGIEKFREEAEERDICIDFSELISQYSDEEEIQHVVEVIQNSTAKVIVVFSSGPDLEPLIKEIVRRNITGKIWLASEAWASSSLIAMPQYFHVVGGTIGFALKAGQIPGFREFLKKVHPRKSVHNGFAKEFWEETFNCHLQEGAKGPLPVDTFLRGHEESGDRFSNSSTAFRPLCTGDENISSVETPYIDYTHLRISYNVYLAVYSIAHALQDIYTCLPGRGLFTNGSCADIKKVEAWQVLKHLRHLNFTNNMGEQVTFDECGDLVGNYSIINWHLSPEDGSIVFKEVGYYNVYAKKGERLFINEEKILWSGFSREVPFSNCSRDCLAGTRKGIIEGEPTCCFECVECPDGEYSDETDASACNKCPDDFWSNENHTSCIAKEIEFLSWTEPFGIALTLFAVLGIFLTAFVLGVFIKFRNTPIVKATNRELSYLLLFSLLCCFSSSLFFIGEPQDWTCRLRQPAFGISFVLCISCILVKTNRVLLVFEAKIPTSFHRKWWGLNLQFLLVFLCTFMQIVICVIWLYTAPPSSYRNQELEDEIIFITCHEGSLMALGFLIGYTCLLAAICFFFAFKSRKLPENFNEAKFITFSMLIFFIVWISFIPAYASTYGKFVSAVEVIAILAASFGLLACIFFNKIYIILFKPSRNTIEEVRCSTAAHAFKVAARATLRRSNVSRKRSSSLGGSTGSTPSSSISSKSNSEDPFPQPERQKQQQPLALTQQEQQQQPLTLPQQQRSQQQPRCKQKVIFGSGTVTFSLSFDEPQKNAMAHRNSTHQNSLEAQKSSDTLTRHEPLLPLQCGETDLDLTVQETGLQGPVGGDQRPEVEDPEELSPALVVSSSQSFVISGGGSTVTENVVNS

SEQ ID NO: 3918 - protein, 375 aa, Homo sapiens; identical to SEQ ID NO: 585

SEQ ID NO: 3919 - protein, 80 aa, Homo sapiens
AVVVPSGEEQRYTCHVQHEGLPKPLTLRWEPSSQSTVPIVGIVAGLAVLAVVVIGAVVAAVMCRRKSSGGKGGSCSQAAC

SEQ ID NO: 3920 - protein, 351 aa, Homo sapiens
MHQDGISSMNQLGGLFVNGRPLPLDTRQQIVRLAVSGMRPCDISRILKVSNGCVSKILGRYYRTGVLEPKGIGGSKPRLATPPVVARIAQLKGECPALFAWEIQRQLCAEGLCTQDKTPSVSSINRVLRALQEDQGLPCTRLRSPAVLAPAVLTPHSGSETPRGTHPGTGHRNRTIFSPSQAEALEKEFQRGQYPDSVARGKLATATSLPEDTVRVWFSNRRAKWRRQEKLKWEMQLPGASQGLTVPRVAPGIISAQQSPGSVPTAALPALEPLGPSCYQLCWATAPERCLSDTPPKACLKPCWGHLPPQPNSLDSGLLCLPCPSSHCHLASLSGSQALLWPGCPLLYGLE

SEQ ID NO: 3921 - protein, 2340 aa, Homo sapiens
MTEGARAADEVRVPLGAPPPGPAALVGASPESPGAPGREAERGSELGVSPSESPAAERGAELGADEEQRVPYPALAATVFFCLGQTTRPRSWCLRLVCNPWFEHVSMLVIMLNCVTLGMFRPCEDVECGSERCNILEMVIKMVALGLFGQKCYLGDTWNRLDFFIVVAGMMEYSLDGHNVSLSAIRTVRVLRPLRAINRVPSMRILVTLLLDTLPMLGNVLLLCFFVFFIFGIVGVQLWAGLLRNRCFLDSAFVRNNNLTFLRPYYQTEEGEENPFICSSRRDNGMQKCSHIPGRRELRMPCTLGWEAYTQPQAEGVGAARNACINWNQYYNVCRSGDSNPHNGAINFDNIGYAWIAIFQVITLEGWVDIMYYVMDAHSFYNFIYFILLIIVGSFFMINLCLVVIATQFSETKQRESQLMREQRARHLSNDSTLASFSEPGSCYEELLKYVGHIFRKVKRRSLRLYARWQSRWRKKVDPSAVQGQGPGHRQRRAGRHTASVHHLVYHHHHHHHHHYHFSHGSPRRPGPEPGACDTRLVRAGAPPSPPSPGRGPPDAESVHSIYHADCHIEGPQERARVAHAAATAAASLRLATGLGTMNYPTILPSGVGSGKGSTSPGPKGKWAGGPPGTGGHGPLSLNSPDPYEKIPHVVGEHGLGQAPGHLSGLSVPCPLPSPPAGTLTCELKSCPYCTRALEDPEGELSGSESGDSDGRGVYEFTQDVRHGDRWDPTRPPRATDTPGPGPGSPQRRAQQRAAPGEPGWMGRLWVTFSGKLRRIVDSKYFSRGIMMAILVNTLSMGVEYHEQPEELTNALEISNIVFTSMFALEMLLKLLACGPLGYIRNPYNIFDGIIVVISVWEIVGQADGGLSVLRTFRLLRVLKLVRFLPALRRQLVVLVKTMDNVATFCTLLMLFIFIFSILGMHLFGCKFSLKTDTGDTVPDRKNFDSLLWAIVTVFQILTQEDWNVVLYNGMASTSSWAALYFVALMTFGNYVLFNLLVAILVEGFQAEGDANRSDTDEDKTSVHFEEDFHKLRELQTTELKMCSLAVTPNGHLEGRGSLSPPLIMCTAATPMPTPKSSPFLDAAPSLPDSRRGSSSSGDPPLGDQKPPASLRSSPCAPWGPSGAWSSRRSSWSSLGRAPSLKRRGQCGERESLLSGEGKGSTDDEAEDGRAAPGPRATPLRRAESLDPRPLRPAALPPTKCRDRDGQVVALPSDFFLRIDSHREDAAELDDDSEDSCCLRLHKVLEPYKPQWCRSREAWALYLFSPQNRFRVSCQKVITHKMFDHVVLVFIFLNCVTIALERPDIDPGSTERVFLSVSNYIFTAIFVAEMMVKVVALGLLSGEHAYLQSSWNLLDGLLVLVSLVDIVVAMASAGGAKILGVLRVLRLLRTLRPLRVISRAPGLKLVVETLISSLRPIGNIVLICCAFFIIFGILGVQLFKGKFYYCEGPDTRNISTKAQCRAAHYRWVRRKYNFDNLGQALMSLFVLSSKDGWVNIMYDGLDAVGVDQQPVQNHNPWMLLYFISFLLIVSFFVLNMFVGVVVENFHKCRQHQEAEEARRREEKRLRRLERRRRSTFPSPEAQRRPYYADYSPTRRSIHSLCTSHYLDLFITFIICVNVITMSMEHYNQPKSLDEALKYCNYVFTIVFVFEAALKLVAFGFRRFFKDRWNQLDLAIVLLSLMGITLEEIEMSAALPINPTIIRIMRVLRIARVLKLLKMATGMRALLDTVVQALPQVGNLGLLFMLLFFIYAALGVELFGRLECSEDNPCEGLSRHATFSNFGMAFLTLFRVSTGDNWNGIMKDTLRECSREDKHCLSYLPALSPVYFVTFVLVAQFVLVNVVVAVLMKHLEESNKEAREDAELDAEIELEMAQGPGSARRVDADRPPLPQESPGARDAPNLVARKVSVSRMLSLPNDSYMFRPVVPASAPHPRPLQEVEMETYGAGTPLGSVASVHSPPAESCASLQIPLAVSSPARSGEPLHALSPRGTARSPSLSRLLCRQEAVHTDSLEGKIDSPRDTLDPAEPGEKTPVRPVTQGGSLQSPPRSPRPASVRTRKHTFGQRCVSSRPAAPGGEEAEASDPADEEVSHITSSACPWQPTAEPHGPEASPVAGGERDLRRLYSVDAQGFLDKPGRADEQWRPSAELGSGEPGEAKAWGPEAEPALGARRKKKMSPPCISVEPPAEDEGSARPSAAEGGSTTLRRRTPSCEATPHRDSLEPTEGSGAGGDPAAKGERWGQASCRAEHLTVPSFAFEPLDLGVPSGDPFLDGSHSVTPESRASSSGAIVPLEPPESEPPMPVGDPPEKRRGLYLTVPQCPLEKPGSPSATPAPGGGADDPV

SEQ ID NO: 3922 - protein, 417 aa, Homo sapiens; identical to SEQ ID NO: 95

SEQ ID NO: 3923 - protein, 1259 aa, Homo sapiens
MIYMDDGVSSFVQIRGSVPLFWEQPGLQVGSHHLRLHRGLEANAPAFDRHMVLLKEQYGQQVVVNLLGSRGGEEVLNRAFKKLLWASCHAGDTPMINFDFHQFAKGGKLEKLETLLRPQLKLHWEDFDVFTKGENVSPRFQKGTLRMNCLDCLDRTNTVQSFIALEVLHLQLKTLGLSSKPIVDRFVESFKAMWSLNGHSLSKVFTGSRALEGKAKVGKLKDGARSMSRTIQSNFFDGVKQEAIKLLLVGDVYGEEVADKGGMLLDSTALLVTPRILKAMTERQSEFTNFKRIRIAMGTWNVNGGKQFRSNVLRTAELTDWLLDSPQLSGATDSQDDSSPADIFAVGFEEMVELSAGNIVNASTTNKKMWGEQLQKAISRSHRYILLTSAQLVGVCLYIFVRPYHVPFIRDVAIDTVKTGMGGKAGNKGAVGIRFQFHSTSFCFICSHLTAGQSQVKERNEDYKEITQKLCFPMGRNVFSHDYVFWCGDFNYRIDLTYEEVFYFVKRQDWKKLLEFDQLQLQKSSGKIFKDFHEGAINFGPTYKYDVGSAAYDTSDKCRTPAWTDRVLWWRKKHPFDKTAGELNLLDSDLDVDTKVRHTWSPGALQYYGRAELQASDHRPVLAIVEVEVQEVDVGARERVFQEVSSFQGPLDATVVVNLQSPTLEEKNEFPEDLRTELMQTLGSYGTIVLVRINQGQMLVTFADSHSALSVLDVDGMKVKGRAVKIRPKTKDWLKGLREEIIRKRDSMAPVSPTANSCLLEENFDFTSLDYESEGDILEDDEDYLVDEFNQPGVSDSELGGDDLSDVPGPTALAPPSKSPALTKKKQHPTYKDDADLVELKRELEAVGEFRHRSPSRSLSVPNRPRPPQPPQRPPPPTGLMVKKSASDASISSGTHGQYSILQTARLLPGAPQQPPKARTGISKPYNVKQIKTTNAQEAEAAIRCLLEARGGASEEALSAVAPRDLEASSEPEPTPGAAKPETPQAPPLLPRRPPPRVPAIKKPTLRRTGKPLSPEEQFEQQTVHFTIGPPETSVEAPPVVTAPRVPPVPKPRTFQPGKAAERPSHRKPASDEAPPGAGASVPPPLEAPPLVPKVPPRRKKSAPAAFHLQVLQSNSQLLQGLTYNSSDSPSGHPPAAGTVFPQGDFLSTSSATSPDSDGTKAMKPEAAPLLGDYQDPFWNLLHHPKLLNNTWLSKSSDPLDSGTRSPKRDPIDPVSAGASAAKAELPPDHEHKTLGHWVTISDQEKRTALQVFDPLAKT

SEQ ID NO: 3924 - protein, 50 aa, Homo sapiens
QRQHRASRENVGHWAISREGQNVRPSLAPPMVQVRNPLRAGSQGHRLGQL

SEQ ID NO: 3925 - protein, 1288 aa, Homo sapiens
MALSKGLRLLGRLGAEGDCSVLLEARGRDDCLLFEAGTVATLAPEEKEVIKGQYGKLTDAYGCLGELRLKSGGTSLSFLVLVTGCTSVGRIPDAEIYKITATDFYPLQEEAKEEERLIALKKILSSGVFYFSWPNDGSRFDLTVRTQKQGDDSSEWGNSFFWNQLLHVPLRQHQVSCCDWLLKIICGVVTIRTVYASHKQAKACLVSRVSCERTGTRFHTRGVNDDGHVSNFVETEQMIYMDDGVSSFVQIRGSVPLFWEQPGLQVGSHHLRLHRGLEANAPAFDRHMVLLKEQYGQQVVVNLLGSRGGEEVLNRAFKKLLWASCHAGDTPMINFDFHQFAKGGKLEKLETLLRPQLKLHWEDFDVFTKGENVSPRFQKGTLRMNCLDCLDRTNTVQSFIALEVLHLQLKTLGLSSKPIVDRFVESFKAMWSLNGHSLSKVFTGSRALEGKAKVGKLKDGARSMSRTIQSNFFDGVKQEAIKLLLVGDVYGEEVADKGGMLLDSTALLVTPRILKAMTERQSEFTNFKRIRIAMGTWNVNGGKQFRSNVLRTAELTDWLLDSPQLSGATDSQDDSSPADIFAVGFEEMVELSAGNIVNASTTNKKMWGEQLQKAISRSHRYILLTSAQLVGVCLYIFVRPYHVPFIRDVAIDTVKTGMGGKAGNKGAVGIRFQFHSTSFCFICSHLTAGQSQVKERNEDYKEITQKLCFPMGRNVFSHDYVFWCGDFNYRIDLTYEEVFYFVKRQDWKKLLEFDQLQLQKSSGKIFKDFHEGAINFGPTYKYDVGSAAYDTSDKCRTPAWTDRVLWWRKKHPFDKTAGELNLLDSDLDVDTKVRHTWSPGALQYYGRAELQASDHRPVLAIVEVEVQEVDVGARERVFQEVSSFQGPLDATVVVNLQSPTLEEKNEFPEDLRTELMQTLGSYGTIVLVRINQGQMLVTFADSHSALSVLDVDGMKVKGRAVKIRPKTKDWLKGLREEIIRKRDSMAPVSPTANSCLLEENFDFTSLDYESEGDILEDDEDYLVDEFNQPGVSDSELGGDDLSDVPGPTALAPPSKSPALTKKKQHPTYKDDADLVELKRELEAVGEFRHRSPSRSLSVPNRPRPPQPPQRPPPPTGLMVKKSASDASISSGTHGQYSILQTARLLPGAPQQPPKARTGISKPYNVKQIKTTNAQEAEAAIRCLLEARGGASEEALSAVAPRDLEASSEPEPTPGAAKPETPQAPPLLPRRPPPRVPAIKKPTLRRTGKIVFCSRSQASQPCLLLQRHEFVRTVAAQRLASVDTSGSSV

SEQ ID NO: 3926 - protein, 597 aa, Homo sapiens
QLEVKLVLLWKHNMRIEYVAMAPWPLEPEGPRVTRVEVTMEGGYDILHDVSCALRQPIRSLYRTHVIRRFWNTLQSINQTDQMLAHLQSFSSVPEHFTLPDSTKSGVPLFYIPPGSTTPVLSLQPSGSDSSHAQFAAYWKPVLSMDANSWQRWLHMHRLVLILEHDTPIPKHLHTPGSNGRYSTIQCRISHSSLTSLLRDWSSFVLVEGYSYVKLLSSAPDQPPNSFYMVRIISKAPCMVLRLGFPIGTPAPARHKIVSGLREEILRLRFPHRVQSKEPTPKVKRKGLGGAGGGSSPSKSPPVLGPQQALSDRPCLVVLHKPLDKLLIRYEKLPLDYRAPFLLTLEPPGPLPLVSGRSASSSLASLSRYLYHQRWLWSVPSGLAPALPLSAIAQLLSILTEVRLSEGFHFACSGEGIINMVLELPIQNEPPGQAAAEEKHTCVVQYILFPPHSTSTKDSFSTDDDNDVEVEALEGDSELNLVTEVWVEPQYGRVGPGPGIWKHLQDLTYSEIPQALHPRDAACIGSMLSFEYLIQLCQSKEWGPLPPEPRVSDGLDQGGDTCVHEIPFHFDLMGLLPQCQQLQMFFLLLARAAWGRS

SEQ ID NO: 3927 - protein, 325 aa, Homo sapiens
MAVMAPRTLLLLLSGALALTQTWAGSHSMRYFFTSVSRPGRGEPRFIAVGYVDDTQFVRFDSDAASQRMEPRAPWIEQEGPEYWDQETRNVKAQSQTDRVDLGTLRGYYNQSEAGSHTIQIMYGCDVGSDGRFLRGYRQDAYDGKDYIALNEDLRSWTAADMAAQITKRKWEAAHEAEQLRAYLDGTCVEWLRRYLENGKETLQRTDPPKTHMTHHPISDHEATLRCWALGFYPAEITLTWQRDGEDQTQDTELVETRPAGDGTFQKWAAVVVPSGEEQRYTCHVQHEGLPKPLTLRWDRKGGSYTQAASSDSAQGSDVSLTACK

SEQ ID NO: 3928 - protein, 134 aa, Homo sapiens
GAEPGRVDTFWYKFLKREPGGELSWEGNGPHHDRCCTYNENNLVDGVYCLPIGHWIEATGHTNEMKHTTDFYFNIAGHQAMHYSRSRDQRPEFQLCLKMVLSLIFVAQDVHSTQESSSTAAIFGNTHILWPVYK

SEQ ID NO: 3929 - protein, 224 aa, Homo sapiens
MRFRFGVVVPPAVAGARPELLVVGSRPELGRWEPRGAVRLRPAGTAAGDGALALQEPGLWLGEVELAAEEAAQDGAEPGRVDTFWYKFLKREPGGELSWEGNGPHHDRCCTYNENNLVDGVYCLPIGHWIEATGHTNEMKHTTDFYFNIAGHQAMHYSRPSTDAAPGGVPAACAAGEGTHRVRALQRWGGPLHRGCLRLAPVCDGLESEEGAVFPHGQEAGCLH

SEQ ID NO: 3930 - protein, 324 aa, Homo sapiens
MEARNQTAISKFLLLGLIEDPELQPVLFSLFLSMYLVTILGNLLILLAVISDSHLHTPMYFFLSNLSFLDICLSTTTIPKMLVNIQAQNRSITYSGCLTQICFVLFFAGLENCLLAAMAYDRYVAICHPLRYTVIMNPRLCGLLILLSLLTSVVNALLLSLMVLRLSFCTDLEIPLFFCELAQVIQLTCSDTLINNILIYFAACIFGGVPLSGIILSYTQITSCVLRMPSASGKHKAVSTCGSHLSIVLLFYGAGLGVYISSVVTDSPRKTAVASVMYSVFPQMVNPFIYSLRNKDMKGTLRKFIGRIPSLLWCAICFGFRFLE

SEQ ID NO: 3931 - protein, 1761 aa, Homo sapiens [sequence omitted]

SEQ ID NO: 3932 - protein, 324 aa, Homo sapiens
MFYFFPPLQILAENLTMVTEFLLLGFSSLGEIQLALFVVFLFLYLVILSGNVTIISVIHLDKSLHTPMYFFLGILSTSETFYTFVILPKMLINLLSVARTISFNCCALQMFFFLGFAITNCLLLGVMGYDRYAAICHPLHYPTLMSWQVCGKLAAACAIGGFLASLTVVNLVFSLPFCSANKVNHYFCDISAVILLACTNTDVNEFVIFICGVLVLVVPFLFICVSYLCILRTILKIPSAEGRRKAFSTCASHLSVVIVHYGCASFIYLRPTANYVSNKDRLVTVTYTIVTPLLNPMVYSLRNKDVQLAIRKVLGKKGSLKLYN

SEQ ID NO: 3933 - protein, 314 aa, Homo sapiens
MKNKNNVTEFILLGLTQNPEGQKVLFVTFLLIYMVTIMGNLLIIVTIMASQSLGSPMYFFLASLSFIDTVYSTAFAPKMIVDLLSEKKTISFQGCMAQLFMDHLFAGAEVILLVVMAYDRYMAICKPLHELITMNRRVCVLMLLAAWIGGFLHSLVQFLFIYQLPFCGPNVIDNFLCDLYPLLKLACTNTYVTGLSMIANGGAICAVTFFTILLSYGVILHSLKTQSLEGKRKAFYTCASHVTVVILFFVPCIFLYARPNSTFPIDKSMTVVLTFITPMLNPLIYTLKNAEMKSAMRKLWSKKVSLAGKWLYHS

SEQ ID NO: 3934 - protein, 793 aa, Homo sapiens
MCSQEAFQAQRSQLVELLVSGSLEGFESVLDWLLSWEVLSWEDYEGFHLLGQPLSHLARRLLDTVWNKGTWACQKLIAAAQEAQADSQSPKLHGCWDPHSLHPARDLQSHRPAIVRRLHSHVENMLDLAWERGFVSQYECDEIRLPIFTPSQRARRLLDLATVKANGLAAFLLQHVQELPVPLALPLEAATCKKYMAKLRTTVSAQSRFLSTYDGAETLCLEDIYTENVLEVWADVGMAGPPQKSPATLGLEELFSTPGHLNDDADTVLVVGEAGSGKSTLLQRLHLLWAAGQDFQEFLFVFPFSCRQLQCMAKPLSVRTLLFEHCCWPDVGQEDIFQLLLDHPDRVLLTFDGFDEFKFRFTDRERHCSPTDPTSVQTLLFNLLQGNLLKNARKVVTSRPAAVSAFLRKYIRTEFNLKGFSEQGIELYLRKRHHEPGVADRLIRLLQETSALHGLCHLPVFSWMVSKCHQELLLQEGGSPKTTTDMYLLILQHFLLHATPPDSASQGLGPSLLRGRLPTLLHLGRLALWGLGMCCYVFSAQQLQAAQVSPDDISLGFLVRAKGVVPGSTAPLEFLHITFQCFFAAFYLALSADVPPALLRHLFNCGRPGNSPMARLLPTMCIQASEGKDSSVAALLQKAEPHNLQITAAFLAGLLSREHWGLLAECQTSEKALLRRQACARWCLARSLRKHFHSIPPAAPGEAKSVHAMPGFIWLIRSLYEMQEERLARKAARGLNVGHLKLTFCSVGPTECAALAFVLQHLRRPVALQLDYNSVGDIGVEQLLPCLGVCKAL

SEQ ID NO: 3935 - protein, 642 aa, Homo sapiens
MVNEARGNSSLNPCLEGSASSGSESSKDSSRCSTPGLDPERHERLREKMRRRLESGDKWFSLEFFPPRTAEGAVNLISRFDRMAAGGPLYIDVTWHPAGDPGSDKETSSMMIASTAVNYCGLETILHMTCCRQRLEEITGHLHKAKQLGLKNIMALRGDPIGDQWEEEEGGFNYAVDLVKHIRSEFGDYFDICVAGYPKGHPEAGSFEADLKHLKEKVSAGADFIITQLFFEADTFFRFVKACTDMGITCPIVPGIFPIQGYHSLRQLVKLSKLEVPQEIKDVIEPIKDNDAAIRNYGIELAVSLCQELLASGLVPGLHFYTLNREMATTEVLKRLGMWTEDPRRPLPWALSAHPKRREEDVRPIFWASRPKSYIYRTQEWDEFPNGRWGNSSSPAFGELKDYYLFYLKSKSPKEELLKMWGEELTSEESVFEVFVLYLSGEPNRNGHKVTCLPWNDEPLAAETSLLKEELLRVNRQGILTINSQPNINGKPSSDPIVGWGPSGGYVFQKAYLEFFTSRETAEALLQVLKKYELRVNYHLVNVKGENITNAPELQPNAVTWGIFPGREIIQPTVVDPVSFMFWKAHPECERNGGSMTLRPDALRWSHSCPAFLLHSAASLGNSTLLRVSPTPASTPPPDNGS

SEQ ID NO: 3936 - protein, 324 aa, Homo sapiens
MTTVLGSEVILAENLTMVTEFLLLGFSSLGEIQLALFVVFLFLYLVILSGNVTIISVIHLDKSLHTPMYFFLGILSTSETFYTFVILPKMLINLLSVARTISFNCCALQMFFFLGFAITNCLLLGVMGYDRYAAICHPLHYPTLMSWQVCGKLAAACAIGGFLASLTVVNLVFSLPFCSANKVNHYFCDISAVILLACTNTDVNEFVIFICGVLVLVVPFLFICVSYLCILRTILKIPSAEGRRKAFSTCASHLSVVIVHYGCASFIYLRPTANYVSNKDRLVTVTYTIVTPLLNPMVYSLRNKDVQLAIRKVLGKKGSLKLYN

SEQ ID NO: 3937 - protein, 2093 aa, Homo sapiens
MLRLVVQSAKIDPPLAPLPRPCMSIDFRDIKKRTRVVEGNDPVWNETLIWHLWNRPLENDSFLQVTLQDMGSQKKERFIGLATVLLKPLLKQPSEVLFVKDLTLLNHSMKPTDCTVTLQVAHMSNQDIEKTGAEDHLGITAREAASQKLMVPGSTAHRALSSKPQHFQVRVKVFEARQLMGNNIKPVVKVSIAGQQHQTRIKMGNNPFFNEIFFQNFHEVPAKFFDETILIQTDIGFIYHSPGHTLLRKWLGLCQPNNPGSGVTGYLKVTIYALGVGDQALIDQKLLYGTDDTDIQIFKSAVVPINMAYLQLFIYCAEDLHLKKHQSVNPQLEVELIGEKLRTHMQTQTDNPIWNQILTFRIQLPCLSSYIKFRVLDCRKKDCPDEIGTASLSLNQISSTGEEIEGKQSLEPTSYTPRVYSGFLPCFGPSFLTLHGGKKAPFRIQEEGACIPDSVRDGLAYRGRVFLELITQIKSYQDSTIKDLSHEVTRIEKHQNRQKYGLCVIFLSCTMMPNFKELIHFEVSIGHYGNKMDLNYKPLVSSTPYSPVIYDGNIYHYVPWYNTKPVVAVTSNWEDVSFRMNCLNLLHFTRDRLKANLDTLKSTRNPKDPALLYQWEKLLRELAEDCKRPLPCMTYQPKATSLDRKRWQLRSLLLQELAQKAKQAKPKDMVATAEDWLYRLNTVLPEPQMGLPDVMIWLVAKEQRVAYAQVPAHSVLFSPAGALHSGRLCGKIQTLFLQYPEGEGQKDVLPAHLRVCMWLGNVTDSKDLQLLRQGDTAVYAEMYENQAKYKDQWGQQGLYHCPNFSDVMGNKTLPMTDFQPPLGWHWQDSWTVEPQRRLLLDIDINKSQVLEEVYENQGRDTRGAWGPAAIPNTDVNGQPMEARENVKCPQGWHFKKDWVVELNHAVDSWEYGVGIPPSGLPQVWSPVEKTYHSCRRRRWARVRFRNHGELSHEQETLSFLQLGLAKGEEEGWEYDTFGSKFHLNPQPQSRFRRRCWRRRLAPNKDKGIAPIFLLEGSLACEGGSVREEGDWAWARGNRSSTQEPQGRLSWVQAMDLKYHAGKEEDSKTWPWGLDRQFRDPQRQDTRPPNLPFIYCTFNKPHYYQLFCYIYQARNLVSNQILTFQGPFIRVVFLNHSQCTQTLRSSAGPTWAQTLIFQHLLLYENPQDTKESPPLVVLELWQRDFWGKESLWGRSVWPPMVWLDLQDRILPPMRWHPLVKELGKEEGEILASCELILQTEKLGEKQLPILSVPWKNGAYTLPKSIQPTIKRMAIEILAWGLRNMKKASSPQLLVEFGEESLRTEPIRDFQTNPNFPESESVLVLTVLMPTEEAYALPLVVKVVDNWAFGQQTVTGQANIDFLQPYFCDPWAQDYMHPKLPTLSEKKHQDFLGYLYRKFWFKSSKAEDEYEHEVDWWSKLFWATDEHKSLKYKYKDYHTLKVYECELEAVPAFQGLQDFCQTFKLYQEQPKLDSPVVGEFKGLFRIYPFPENPEAPKPPLQFLVWPEREDFPQPCLVRVYMVRAINLQPQDYNGLCDPYVILKLGKTELGNRDMYQPNTLDPIFGMMFELTCNIPLEKDLEIQLYDFDLFSPDDKIGTTVIDLENRLLSGFGAHCGLSKSYCQSGPFRWRDQMPPSYLLERYAKRKGLPPPLFSPEEDAVFYNGKKFKLQSFEPKTPTVHGLGPKKERLALYLLHTQGLVPEHVETRTLYSHSQPGIDQGKVQMWVDIFPKKLGPPGPQVNINPRKPKRKASEHSGHRYELRCIIWKTANVDLVDDNLSREKTSDIYIKGWLYGLEKDMQKTDIHYHSLTGEADFNWRFIFTMDYLAAERTCVQSQKDYIWSLDATSMKFPARLIIQVWDNDIFSPDDFLGVLELDLSDMPLPARHAKQCSIRMMDADPKWPYFIQYKHFSLFKKKTVTGWWPCQVLDGGKWRLSGKVKMSLEILSEKEALIKPAGRGQSEPNQYPTLHPPLRTNTSFTWLRSPVQNFCYIFWKRYRFKLIAFMVISIIALMLFNFIYSAPHYLAMSWIKPQLQLYPPIKIFNIINSLNTSNASSSILPTQDPNLKPTIDHEWKLHPGPTNHLSDIFPELPAPGD

SEQ ID NO: 3938 - protein, 768 aa, Homo sapiens
MLRLVVQSAKIDPPLAPLPRPCMSIDFRDIKKRTRVVEGNDPVWNETLIWHLWNRPLENDSFLQVTLQDMGSQKKERFIGLATVLLKPLLKQPSEVLFVKDLTLLNHSMKPTDCTVTLQVAHMSNQDIEKTGAEDHLGITAREAASQKLMVPGSTAHRALSSKPQHFQVRVKVFEARQLMGNNIKPVVKVSIAGQQHQTRIKMGNNPFFNEIFFQNFHEVPAKFFDETILIQTDIGFIYHSPGHTLLRKWLGLCQPNNPGSGVTGYLKVTIYALGVGDQALIDQKLLYGTDDTDIQIFKSAVVPINMAYLQLFIYCAEDLHLKKHQSVNPQLEVELIGEKLRTHMQTQTDNPIWNQILTFRIQLPCLSSYIKFRVLDCRKKDCPDEIGTASLSLNQISSTGEEIEGVYSGFLPCFGPSFLTLHGGKKAPFRIQEEGACIPDSVRDGLAYRGRVFLELITQIKSYQDSTIKDLSHEVTRIEKHQNRQKYGLCVIFLSCTMMPNFKELIHFEVSIGHYGNKMDLNYKPLVSSTPYSPVIYDGNIYHYVPWYNTKPVVAVTSNWEDVSFRMNCLNLLHFTRDRLKANLDTLKSTRNPKDPALLYQWEKLLRELAEDCKRPLPCMTYQPKATSLDRKRWQLRSLLLQELAQKAKQAKPKDMVATAEDWLYRLNTVLPEPQMGLPDVMIWLVAKEQRVAYAQVPAHSVLFSPAGALHSGRLCGKIQYPEGEGQKDVLPAHLRVCMWLGNVTDSKDLQLLRQGDTAVYAEMVSV

SEQ ID NO: 3939 - protein, 2097 aa, Homo sapiens [sequence omitted]

SEQ ID NO: 3940 - protein, 549 aa, Homo sapiens
MVNEARGNSSLNPCLEGSASSGSESSKDSSRCSTPGLDPERHERLREKMRRRLESGDKWFSLEFFPPRTAEGAVNLISRFDRMAAGGPLYIDVTWHPAGDPGSDKETSSMMIASTAVNYCGLETILHMTCCRQRLEEITGHLHKAKQLGLKNIMALRGDPIGDQWEEEEGGFNYAVDLVKHIRSEFGDYFDICVAGYPKGHPEAGSFEADLKHLKEKVSAGADFIITQLFFEADTFFRFVKACTDMGITCPIVPGIFPIQGYHSLRQLVKLSKLEVPQEIKDVIEPIKDNDAAIRNYGIELAVSLCQELLASGLVPGLHFYTLNREMATTEVLKRLGMWTEDPRRPLPWALSAHPKRREEDVRPIFWASRPKSYIYRTQEWDEFPNGRWGNSSSPAFGELKDYYLFYLKSKSPKEELLKMWGEELTSEESVFEVFVLYLSGEPNRNGHKVTCLPWNDEPLAAETSLLKEELLRVNRQGILTINSQPNINGKPSSDPIVGWGPSGGYVFQKAYLEFFTSRETAEALLQVLKKYELRVNYHLVNVKANHSG

SEQ ID NO: 3941 - protein, 1914 aa, Homo sapiens
MASGLGSPSPCSAGSEEEDMDALLNNSLPPPHPENEEDPEEDLSETETPKLKKKKKPKKPRDPKIPKSKRQKKERMLLCRQLGDSSGEGPEFVEEEEEVALRSDSEGSDYTPGKKKKKKLGPKKEKKSKSKRKEEEEEEDDDDDSKEPKSSAQLLEDWGMEDIDHVFSEEDYRTLTNYKAFSQFVRPLIAAKNPKIAVSKMMMVLGAKWREFSTNNPFKGSSGASVAAAAAAAVAVVESMVTATEVAPPPPPVEVPIRKAKTKEGKGPNARRKPKGSPRVPDAKKPKPKKVAPLKIKLGGFGSKRKRSSSEDDDLDVESDFDDASINSYSVSDGSTSRSSRSRKKLRTTKKKKKGEEEVTAVDGYETDHQDYCEVCQQGGEIILCDTCPRAYHMVCLDPDMEKAPEGKWSCPHCEKEGIQWEAKEDNSEGEEILEEVGGDLEEEDDHHMEFCRVCKDGGELLCCDTCPSSYHIHCLNPPLPEIPNGEWLCPRCTCPALKGKVQKILIWKWGQPPSPTPVPRPPDADPNTPSPKPLEGRPERQFFVKWQGMSYWHCSWVSELQLELHCQVMFRNYQRKNDMDEPPSGDFGGDEEKSRKRKNKDPKFAEMEERFYRYGIKPEWMMIHRILNHSVDKKGHVHYLIKWRDLPYDQASWESEDVEIQDYDLFKQSYWNHRELMRGEEGRPGKKLKKVKLRKLERPPETPTVDPTVKYERQPEYLDATGGTLHPYQMEGLNWLRFSWAQGTDTILADEMGLGKTVQTAVFLYSLYKEGHSKGPFLVSAPLSTIINWEREFEMWAPDMYVVTYVGDKDSRAIIRENEFSFEDNAIRGGKKASRMKKEASVKFHVLLTSYELITIDMAILGSIDWACLIVDEAHRLKNNQSKFFRVLNGYSLQHKLLLTGTPLQNNLEELFHLLNFLTPERFHNLEGFLEEFADIAKEDQIKKLHDMLGPHMLRRLKADVFKNMPSKTELIVRVELSPMQKKYYKYILTRNFEALNARGGGNQVSLLNVVMDLKKCCNHPYLFPVAAMEAPKMPNGMYDGSALIRASGKLLLLQKMLKNLKEGGHRVLIFSQMTKMLDLLEDFLEHEGYKYERIDGGITGNMRQEAIDRFNAPGAQQFCFLLSTRAGGLGINLATADTVIIYDSDWNPHNDIQAFSRAHRIGQNKKVMIYRFVTRASVEERITQVAKKKMMLTHLVVRPGLGSKTGSMSKQELDDILKFGTEELFKDEATDGGGDNKEGEDSSVIHYDDKAIERLLDRNQDETEDTELQGMNEYLSSFKVAQYVVREEEMGEEEEVEREIIKQEESVDPDYWEKLLRHHYEQQQEDLARNLGKGKRIRKQVNYNDGSQEDRDWQDDQSDNQSDYSVASEEGDEDFDERSEAPRRPSRKGLRNDKDKPLPPLLARVGGNIEVLGFNARQRKAFLNAIMRYGMPPQDAFTTQWLVRDLRGKSEKEFKAYVSLFMRHLCEPGADGAETFADGVPREGLSRQHVLTRIGVMSLIRKKVQEFEHVNGRWSMPELAEVEENKKMSQPGSPSPKTPTPSTPGDTQPNTPAPVPPAEDGIKIEENSLKEEESIEGEKEVKSTAPETAIECTQAPAPASEDEKVVVEPPEGEEKVEKAEVKERTEEPMETEPKGKGAADVEKVEEKSAIDLTPIVVEDKEEKKEEEEKKEVMLQNGETPKDLNDEKQKKNIKQRFMFNIADGGFTELHSLWQNEERAATVTKKTYEIWHRRHDYWLLAGIINHGYARWQDIQNDPRYAILNEPFKGEMNRGNFLEIKNKFLARRFKLLEQALVIEEQLRRAAYLNMSEDPSHPSMALNTRFAEVECLAESHQHLSKESMAGNKPANAVLHKVLKQLEELLSDMKADVTRLPATIARIPPVAVRLQMSERNILSRLANRAPEPTPQQVAQQQ

SEQ ID NO: 3942 - protein, 1125 aa, Homo sapiens
MQRFLQLPGAVVRPGVRGACGADQEAASPVLAPEGGPPLRYQALEPEELRWLQAQEEDTTPEASLEGPCPEASQSQSQPLRHDDLKEMLDTNKDSLKLEAMKRIVAMIARGKNASDLFPAVVKNVACKNIEVKKLVYVYLVRYAEEQQDLALLSISTFQRGLKDPNQLIRASALRVLSSIRVPIIVPIMMLAIKEAASDMSPYVRKTAAHAIPKLYSLDSDQKDQLIEVIEKLLADKTTLVAGSVVMAFEEVCPERIDLIHKNYRKLCNLLIDVEEWGQVVIISMLTRYARTQFLSPTQNESLLEENAEKAFYGSEEDEAKGAGSEETAAAAAPSRKPYVMDPDHRLLLRNTKPLLQSRSAAVVMAVAQLYFHLAPKAEVGVIAKALVRLLRSHSEVQYVVLQNVATMSIKRRGMFEPYLKSFYIRSTDPTQIKILKLEVLTNLANETNIPTVLREFQTYIRSMDKDFVAATIQAIGRCATNIGRVRDTCLNGLVQLLSNRDELVVAESVVVIKKLLQMQPAQHGEIIKHLAKLTDNIQVPMARASILWLIGEYCEHVPRIAPDVLRKMAKSFTAEEDIVKLQVINLAAKLYLTNSKQTKLLTQYVLSLAKYDQNYDIRDRARFTRQLIVPSEQGGALSRHAKKLFLAPKPAPVLESSFKDRDHFQLGSLSHLLNAKATGYQELPDWPEEAPDPSVRNVEVPEWTKCSNREKRKEKEKPFYSDSEGESGPTESADSDPESESESDSKSSSESGSGESSSESDNEDQDEDEEKGRGSESEQSEEDGKRKTKKKVPERKGEASSSDEGSDSSSSSSESEMTSESEEEQLEPASWSRKTPPSSKSAPATKEISLLDLEDFTPPSVQPVSPPAIVSTSLAADLEGLTLTDSTLVPSLLSPVSGVGRQELLHRVAGEGLAVDYTFSRQPFSGDPHMVSVHIHFSNSSDTPIKGLHVGTPKLPAGISIQEFPEIESLAPGESATAVMGINFCDSTQAANFQLCTQTRQFYVSIQPPVGELMAPVFMSENEFKKEQGKLMGMNEITEKLMLPDTCRSDHIVVQKVTATANLGRVPCGTSDEYRFAGRTLTGGSLVLLTLDARPAGAAQLTVNSEKMVIGTMLVKDVIQALTQ

SEQ ID NO: 3943 - protein, 875 aa, Homo sapiens
MAAATRRVFHLQPCENSPTMSQNGYFEDSSYYKCDTDDTFEAREEILGDEAFDTANSSIVSGESIRFFVNVNLEMQATNTENEATSGGCVLLHTSRKYLKLKNFKEEIRAHRDLDGFLAQASIVLNETATSLDNVLRTMLRRFARDPDNNEPNCNLDLLMAMLFTDAGAPMRGKVHLLSDTIQGVTATVTGVRYQQSWLCIICTMKALQKRHVCISRLVRPQNWGENSCEVRFVILVLAPPKMKSTKTAMEVARTFATMFSDIAFRQKLLETRTEEEFKEALVHQRQLLTMVSHGPVAPRTKERSTVSLPAHRHPEPPKCKDFVPFGKGIREDIARRFPLYPLDFTDGIIGKNKAVGKYITTTLFLYFACLLPTIAFGSLNDENTDGAIDVQKTIAGQSIGGLLYALFSGQPLVILLTTAPLALYIQVIRVICDDYDLDFNSFYAWTGLWNSFFLALYAFFNLSLVMSLFKRSTEEIIALFISITFVLDAVKGTVKIFWKYYYGHYLDDYHTKRTSSLVSLSGLGASLNASLHTALNASFLASPTELPSATHSGQATAVLSLLIMLGTLWLGYTLYQFKKSPYLHPCVREILSDCALPIAVLAFSLISSHGFREIEMSKFRYNPSESPFAMAQIQSLSLRAVSGAMGLGFLLSMLFFIEQNLVAALVNAPENRLVKGTAYHWDLLLLAIINTGLSLFGLPWIHAAYPHSPLHVRALALVEERVENGHIYDTIVNVKETRLTSLGASVLVGLSLLLLPVPLQWIPKPVLYGLFLYIALTSLDGNQLVQRVALLLKEQTAYPPTHYIRRVPQRKIHYFTGLQVLQLLLLCAFGMSSLPYMKMIFPLIMIAMIPIRYILLPRIIEAKYLDVMDAEHRP

SEQ ID NO: 3944 - protein, 557 aa, Homo sapiens
MPLAFCGSENHSAAYRVDQGVLNNGCFVDALNVVPHVFLLFITFPILFIGWGSQSSKVHIHHSTWLHFPGHNLRWILTFMLLFVLVCEIAEGILSDGVTESHHLHLYMPAGMAFMAAVTSVVYYHNIETSNFPKLLIALLVYWTLAFITKTIKFVKFLDHAIGFSQLRFCLTGLLVILYGMLLLVEVNVIRVRRYIFFKTPREVKPPEDLQDLGVRFLQPFVNLLSKGTYWWMNAFIKTAHKKPIDLRAIGKLPIAMRALTNYQRLCEAFDAQRKDIQGTQGARAIWQALSHAFGRRLVLSSTFRILADLLGFAGPLCIFGIVDHLGKENDVFQPKTQFLGVYFVSSQEFLANAYVLAVLLFLALLLQRTFLQASYYVAIETGINLRGAIQTKIYNKIMHLSTSNLSMGEMTAGQICNLVAIDTNQLMWFFFLCPNLWAMPVQIIVGVILLYYILGVSALIGAAVIILLAPVQYFVATKLSQAQRSTLEYSNERLKQTNEMLRGIKLLKLYAWENIFRTRVETTRRKEMTSLRAFAIYTSISIFMNTAIPIAAVLIG

SEQ ID NO: 3945 - protein, 158 aa, Homo sapiens
LPQTLQPPLQHTTPQAQAQSLSRPAQVSQPFRGLIPAGTQHSMIATTGKMSEMELKAFGSGIDIKPGTPPIAGRSTTPTSSPFRATSTSPNSQSSKMNSIVYQKQFQSAPATVRMTQPFPTQFAPQKRAVGRGLSHKTFGPRCKAESRGSSVHATVLL

SEQ ID NO: 3946 - protein, 564 aa, Homo sapiens
GSENHSAAYRVDQGVLNNGCFVDALNVVPHVFLLFITFPILFIGWGSQSSKVHIHHSTWLHFPGHNLRWILTFMLLFVLVCEIAEGILSDGVTESHHLHLYMPAGMAFMAAVTSVVYYHNIETSNFPKLLIALLVYWTLAFITKTIKFVKFLDHAIGFSQLRFCLTGLLVILYGMLLLVEVNVIRVRRYIFFKTPREVKPPEDLQDLGVRFLQPFVNLLSKGTYWWMNAFIKTAHKKPIDLRAIGKLPIAMRALTNYQRLCEAFDAQRKDIQGTQGARAIWQALSHAFGRRLVLSSTFRILADLLGFAGPLCIFGIVDHLGKENDVFQPKTQFLGVYFVSSQEFLANAYVLAVLLFLALLLQRTFLQASYYVAIETGINLRGAIQTKIYNKIMHLSTSNLSMGEMTAGQICNLVAIDTNQLMWFFFLCPNLWAMPVQIIVGVILLYYILGVSALIGAAVIILLAPVQYFVATKLSQAQRSTLEYSNERLKQTNEMLRGIKLLKLYAWENIFRTRVETTRRKEMTSLRAFAIYTSISIFMNTAIPIAAVLIRAKAKRVPVQCRDP

SEQ ID NO: 3947 - protein, 631 aa, Homo sapiens
MKLLHVFLLFLCFHLRFCKVTYTSQEDLVEKKCLAKKYTHLSCDKVFCQPWQRCIEGTCVCKLPYQCPKNGTAVCATNRRSFPTYCQQKSLECLHPGTKFLNNGTCTAEGKFSVSLKHGNTDSEGIVEVKLVDQDKTMFICKSSWSMREANVACLDLGFQQGADTQRRFKLSDLSINSTECLHVHCRGLETSLAECTFTKRRTMGYQDFADVVCYTQKADSPMDDFFQCVNGKYISQMKACDGINDCGDQSDELCCKACQGKGFHCKSGVCIPSQYQCNGEVDCITGEDEVGCAGFASVTQEETEILTADMDAERRRIKSLLPKLSCGVKNRMHIRRKRIVGGKRAQLGDLPWQVAIKDASGITCGGIYIGGCWILTAAHCLRASKTHRYQIWTTVVDWIHPDLKRIVIEYVDRIIFHENYNAGTYQNDIALIEMKKDGNKKDCELPRSIPACVPWSPYLFQPNDTCIVSGWGREKDNERVFSLQWGEVKLISNCSKFYGNRFYEKEMECAGSKPFPRYGYKPSPPNGCGSPLFGVHLNIGIPSLTKCCNQHDRCYETCGKSKNDCDEEFQYCLSKICRDVQKTLGLTQHVQACETTVELLFDSVIHLGCKPYLDSQRAACRCHYEEKTDL

SEQ ID NO: 3948 - protein, 1888 aa, Homo sapiens
DMDALLNNSLPPPHPENEEDPEEDLSETETPKLKKKKKPKKPRDPKIPKSKRQKKELGDSSGEGPEFVEEEEEVALRSDSEGSDYTPGKKKKKKLGPKKEKKSKSKRKEEEEEEDDDDDSKEPKSSAQLLEDWGMEDIDHVFSEEDYRTLTNYKAFSQFVRPLIAAKNPKIAVSKMMMVLGAKWREFSTNNPFKGSSGASVAAAAAAAVAVVESMVTATEVAPPPPPVEVPIRKAKTKEGKGPNARRKPKGSPRVPDAKKPKPKKVAPLKIKLGGFGSKRKRSSSEDDDLDVESDFDDASINSYSVSDGSTSRSSRSRKKLRTTKKKKKGEEEVTAVDGYETDHQDYCEVCQQGGEIILCDTCPRAYHMVCLDPDMEKAPEGKWSCPHCEKEGIQWEAKEDNSEGEEILEEVGGDLEEEDDHHMEFCRVCKDGGELLCCDTCPSSYHIHCLNPPLPEIPNGEWLCPRCTCPALKGKVQKILIWKWGQPPSPTPVPRPPDADPNTPSPKPLEGRPERQFFVKWQGMSYWHCSWVSELQLELHCQVMFRNYQRKNDMDEPPSGDFGGDEEKSRKRKNKDPKFAEMEERFYRYGIKPEWMMIHRILNHSVDKKGHVHYLIKWRDLPYDQASWESEDVEIQDYDLFKQSYWNHRELMRGEEGRPGKKLKKVKLRKLERPPETPTVDPTVKYERQPEYLDATGGTLHPYQMEGLNWLRFSWAQGTDTILADEMGLGKTVQTAVFLYSLYKEGHSKGPFLVSAPLSTIINWEREFEMWAPDMYVVTYVGDKDSRAIIRENEFSFEDNAIRGGKKASRMKKEASVKFHVLLTSYELITIDMAILGSIDWACLIVDEAHRLKNNQSKFFRVLNGYSLQHKLLLTGTPLQNNLEELFHLLNFLTPERFHNLEGFLEEFADIAKEDQIKKLHDMLGPHMLRRLKADVFKNMPSKTELIVRVELSPMQKKYYKYILTRNFEALNARGGGNQVSLLNVVMDLKKCCNHPYLFPVAAMEAPKMPNGMYDGSALIRASGKLLLLQKMLKNLKEGGHRVLIFSQMTKMLDLLEDFLEHEGYKYERIDGGITGNMRQEAIDRFNAPGAQQFCFLLSTRAGGLGINLATADTVIIYDSDWNPHNDIQAFSRAHRIGQNKKVMIYRFVTRASVEERITQVAKKKMMLTHLVVRPGLGSKTGSMSKQELDDILKFGTEELFKDEATDGGGDNKEGEDSSVIHYDDKAIERLLDRNQDETEDTELQGMNEYLSSFKVAQYVVREEEMGEEEEVEREIIKQEESVDPDYWEKLLRHHYEQQQEDLARNLGKGKRIRKQVNYNDGSQEDRDWQDDQSDNQSDYSVASEEGDEDFDERSEAPRRPSRKGLRNDKDKPLPPLLARVGGNIEVLGFNARQRKAFLNAIMRYGMPPQDAFTTQWLVRDLRGKSEKEFKAYVSLFMRHLCEPGADGAETFADGVPREGLSRQHVLTRIGVMSLIRKKVQEFEHVNGRWSMPELAEVEENKKMSQPGSPSPKTPTPSTPGDTQPNTPAPVPPAEDGIKIEENSLKEEESIEGEKEVKSTAPETAIECTQAPAPASEDEKVVVEPPEGEEKVEKAEVKERTEEPMETEPKGAADVEKVEEKSAIDLTPIVVEDKEEKKEEEEKKEVMLQNGETPKDLNDEKQKKNIKQRFMFNIADGGFTELHSLWQNEERAATVTKKTYEIWHRRHDYWLLAGIINHGYARWQDIQNDPRYAILNEPFKGEMNRGNFLEIKNKFLARRFKLLEQALVIEEQLRRAAYLNMSEDPSHPSMALNTRFAEVECLAESHQHLSKESMAGNKPANAVLHKGILKQLEELLSDMKADVTRLPATIARIPPVAVRLQMSERNILSRLANRAPEPTPQQVAQQQ

SEQ ID NO: 3949 - protein, 1671 aa, Homo sapiens
MASGLGSPSPCSAGSEEEDMDALLNNSLPPPHPENEEDPEEDLSETETPKLKKKKKPKKPRDPKIPKSKRQKKELGDSSGEGPEFVEEEEEVALRSDSEGSDYTPGKKKKKKLGPKKEKKSKSKRKEEEEEEDDDDDSKEPKSSAQLLEDWGMEDIDHVFSEEDYRTLTNYKAFSQFVRPLIAAKNPKIAVSKMMMVLGAKWREFSTNNPFKGSSGASVAAAAAAAVAVVESMVTATEVAPPPPPVEVPIRKAKTKEGKGPNARRKPKGSPRVPDAKKPKPKKVAPLKIKLGGFGSKRKRSSSEDDDLDVESDFDDASINSYSVSDGSTSRSSRSRKKLRTTKKKKKGEEEVTAVDGYETDHQDYCEVCQQGGEIILCDTCPRAYHMVCLDPDMEKAPEGKWSCPHCEKEGIQWEAKEDNSEGEEILEEVGGDLEEEDDHHMEFCRVCKDGGELLCCDTCPSSYHIHCLNPPLPEIPNGEWLCPRCTCPALKGKVQKILIWKWGQPPSPTPVPRPPDADPNTPSPKPLEGRPERQFFVKWQGMSYWHCSWVSELQLELHCQVMFRNYQRKNDMDEPPSGDFGGDEEKSRKRKNKDPKFAEMEERFYRYGIKPEWMMIHRILNHSVDKKGHVHYLIKWRDLPYDQASWESEDVEIQDYDLFKQSYWNHRELMRGEEGRPGKKLKKVKLRKLERPPETPTVDPTVKYERQPEYLDATGGTLHPYQMEGLNWLRFSWAQGTDTILADEMGLGKTVQTAVFLYSLYKEGHSKGPFLVSAPLSTIINWEREFEMWAPDMYVVTYVGDKDSRAIIRENEFSFEDNAIRGGKKASRMKKEASVKFHVLLTSYELITIDMAILGSIDWACLIVDEAHRLKNNQSKFFRVLNGYSLQHKLLLTGTPLQNNLEELFHLLNFLTPERFHNLEGFLEEFADIAKEDQIKKLHDMLGPHMLRRLKADVFKNMPSKTELIVRVELSPMQKKYYKYILTRNFEALNARGGGNQVSLLNVVMDLKKCCNHPYLFPVAAMEAPKMPNGMYDGSALIRASGKLLLLQKMLKNLKEGGHRVLIFSQMTKMLDLLEDFLEHEGYKYERIDGGITGNMRQEAIDRFNAPGAQQFCFLLSTRAGGLGINLATADTVIIYDSDWNPHNDIQAFSRAHRIGQNKKVMIYRFVTRASVEERITQVAKKKMMLTHLVVRPGLGSKTGSMSKQELDDILKFGTEELFKDEATDGGGDNKEGEDSSVIHYDDKAIERLLDRNQDETEDTELQGMNEYLSSFKVAQYVVREEEMGEEEEVEREIIKQEESVDPDYWEKLLRHHYEQQQEDLARNLGKGKRIRKQVNYNDGSQEDRDWQDDQSDNQSDYSVASEEGDEDFDERSEAPRRPSRKGLRNDKDKPLPPLLARVGGNIEVLGFNARQRKAFLNAIMRYGMPPQDAFTTQWLVRDLRGKSEKEFKAYVSLFMRHLCEPGADGAETFADGVPREGLSRQHVLTRIGVMSLIRKKVQEFEHVNGRWSMPELAEVEENKKMSQPGSPSPKTPTPSTPGDTQPNTPAPVPPAEDGIKIEENSLKEEESIEGEKEVKSTAPETAIECTQAPAPASEDEKVVVEPPEGEEKVEKAEVKERTEEPMETEPKGVLLVAQAGVQWCDLGLLQPPPPEFKRFSCLSLLSSWDYRCC

SEQ ID NO: 3950 - protein, 693 aa, Homo sapiens
MPLAFCGSENHSAAYRVDQGVLNNGCFVDALNVVPHVFLLFITFPILFIGWGSQSSKVHIHHSTWLHFPGHNLRWILTFMLLFVLVCEIAEGILSDGVTESHHLHLYMPAGMAFMAAVTSVVYYHNIETSNFPKLLIALLVYWTLAFITKTIKFVKFLDHAIGFSQLRFCLTGLLVILYGMLLLVEVNVIRVRRYIFFKTPREVKPPEDLQDLGVRFLQPFVNLLSKGTYWWMNAFIKTAHKKPIDLRAIGKLPIAMRALTNYQRLCEAFDAQRKDIQGTQGARAIWQALSHAFGRRLVLSSTFRILADLLGFAGPLCIFGIVDHLGKENDVFQPKTQFLGVYFVSSQEFLANAYVLAVLLFLALLLQRTFLQASYYVAIETGINLRGAIQTKIYNKIMHLSTSNLSMGEMTAGQICNLVAIDTNQLMWFFFLCPNLWAMPVQIIVGVILLYYILGVSALIGAAVIILLAPVQYFVATKLSQAQRSTLEYSNERLKQTNEMLRGIKLLKLYAWENIFRTRVETTRRKEMTSLRAFAIYTSISIFMNTAIPIAAVLITFVGHVSFFKEADFSPSVAFASLSLFHILVTPLFLLSSVVRSTVKALVRATKNEAIPSPRGCPMDIRRHPLCLSFPGQVSPTLSTAPEPSQPQPVKQLPPSAGSCSDWPTALGGSHFQALEPHGDSATVPEALPSWE

SEQ ID NO: 3951 - protein, 558 aa, Homo sapiens
MPLAFCGSENHSAAYRVDQGVLNNGCFVDALNVVPHVFLLFITFPILFIGWGSQSSKVHIHHSTWLHFPGHNLRWILTFMLLFVLVCEIAEGILSDGVTESHHLHLYMPAGMAFMAAVTSVVYYHNIETSNFPKLLIALLVYWTLAFITKTIKFVKFLDHAIGFSQLRFCLTGLLVILYGMLLLVEVNVIRVRRYIFFKTPREVKPPEDLQDLGVRFLQPFVNLLSKGTYWWMNAFIKTAHKKPIDLRAIGKLPIAMRALTNYQRLCEAFDAQVRKDIQGTQGARAIWQALSHAFGRRLVLSSTFRILADLLGFAGPLCIFGIVDHLGKENDVFQPKTQFLGVYFVSSQEFLANAYVLAVLLFLALLLQRTFLQASYYVAIETGINLRGAIQTKIYNKIMHLSTSNLSMGEMTAGQICNLVAIDTNQLMWFFFLCPNLWAMPVQIIVGVILLYYILGVSALIGAAVIILLAPVQYFVATKLSQAQRSTLEYSNERLKQTNEMLRGIKLLKLYAWENIFRTRVETTRRKEMTSLRAFAIYTSISIFMNTAIPIAAVLIC

SEQ ID NO: 3952 - protein, 892 aa, Homo sapiens
MSERAADDVRGEPRRAAAAAGGAAAAAARQQQQQQQQQQPPPPQPQRQQHPPPPPRRTRPEDGGPGAASTSAAAMATVGERRPLPSPEVMLGQSWNLWVEASKLPGKDGTELDESFKEFGKNREVMGLCREDMPIFGFCPAHDDFYLVVCNDCNQVVKPQAFQSHYERRHSSSSKPPLAVPPTSVFSFFPSLSKSKGGSASGSNRSSSGGVLSASSSSSKLLKSPKEKLQLRGNTRPMHPIQQSRVPHGRIMTPSVKVEKIHPKMDGTLLKSAVGPTCPATVSSLVKPGLNCPSIPKPTLPSPGQILNGKGLPAPPTLEKKPEDNSNNRKFLNKRLSEREFDPDIHCGVIDLDTKKPCTRSLTCKTHSLTQRRAVQGRRKRFDVLLAEHKNKTREKELIRHPDSQQPPQPLRDPHPAPPRTSQEPHQNPHGVIPSESKPFVASKPKPHTPSLPRPPGCPAQQGGSAPIDPPPVHESPHPPLPATEPASRLSSEEGEGDDKEESVEKLDCHYSGHHPQPASFCTFGSRQIGRGYYVFDSRWNRLRCALNLMVEKHLNAQLWKKIPPVPSTTSPISTRIPHRTNSVPTSQCGVSYLAAATVSTSPVLLSSTCISPNSKSVPAHGTTLNAQPAASGAMDPVCSMQSRQVSSSSSSPSTPSGLSSVPSSPMSRKPQKLKSSKSLRPKESSGNSTNCQNASSSTSGGSGKKRKNSSPLLVHSSSSSSSSSSSSHSMESFRKNCVAHSGPPYPSTVTSSHSIGLNCVTNKANAVNVRHDQSGRGPPTGSPAESIKRMSVMVNSSDSTLSLGPFIHQSNELPVNSHGSFSHSHTPLDKLIGKKRKCSPSSSSINNSSSKPTKVAKVPAVNNVHMKHTGTIPGAQGLMNSSLLHQVGNGL

SEQ ID NO: 3953 - protein, 1580 aa, Homo sapiens
MPLAFCGSENHSAAYRVDQGVLNNGCFVDALNVVPHVFLLFITFPILFIGWGSQSSKVHIHHSTWLHFPGHNLRWILTFMLLFVLVCEIAEGILSDGVTESHHLHLYMPAGMAFMAAVTSVVYYHNIETSNFPKLLIALLVYWTLAFITKTIKFVKFLDHAIGFSQLRFCLTGLLVILYGMLLLVEVNVIRVRRYIFFKTPREVKPPEDLQDLGVRFLQPFVNLLSKGTYWWMNAFIKTAHKKPIDLRAIGKLPIAMRALTNYQRLCEAFDAQRKDIQGTQGARAIWQALSHAFGRRLVLSSTFRILADLLGFAGPLCIFGIVDHLGKENDVFQPKTQFLGVYFVSSQEFLANAYVLAVLLFLALLLQRTFLQASYYVAIETGINLRGAIQTKIYNKIMHLSTSNLSMGEMTAGQICNLVAIDTNQLMWFFFLCPNLWAMPVQIIVGVILLYYILGVSALIGAAVIILLAPVQYFVATKLSQAQRSTLEYSNERLKQTNEMLRGIKLLKLYAWENIFRTRVETTRRKEMTSLRAFAIYTSISIFMNTAIPIAAVLITFVGHVSFFKEADFSPSVAFASLSLFHILVTPLFLLSSVVRSTVKALVSVQKLSEFLSSAEIREEQCAPHEPTPQGPASKYQAVPLRVVNRKRPAREDCRGLTGPLQSLVPSADGDADNCCVQIMGGYFTWTPDGIPTLSNITIRIPRGQLTMIVGQVGCGKSSLLLAALGEMQKVSGAVFWSSLPDSEIGEDPSPERETATDLDIRKRGPVAYASQKPWLLNATVEENIIFESPFNKQRYKMVIEACSLQPDIDILPHGDQTQIGERGINLSGGQRQRISVARALYQHANVVFLDDPFSALDIHLSDHLMQAGILELLRDDKRTVVLVTHKLQYLPHADWIIAMKDGTIQREGTLKDFQRSECQLFEHWKTLMNRQDQELEKETVTERKATEPPQGLSRAMSSRDGLLQDEEEEEEEAAESEEDDNLSSMLHQRAEIPWRACAKYLSSAGILLLSLLVFSQLLKHMVLVAIDYWLAKWTDSALTLTPAARNCSLSQECTLDQTVYAMVFTVLCSLGIVLCLVTSVTVEWTGLKVAKRLHRSLLNRIILAPMRFFETTPLGSILNRFSSDCNTIDQHIPSTLECLSRSTLLCVSALAVISYVTPVFLVALLPLAIVCYFIQKYFRVASRDLQQLDDTTQLPLLSHFAETVEGLTTIRAFRYEARFQQKLLEYTDSNNIASLFLTAANRWLEVRMEYIGACVVLIAAVTSISNSLHRELSAGLVGLGLTYALMVSNYLNWMVRNLADMELQLGAVKRIHGLLKTEAESYEGLLAPSLIPKNWPDQGKIQIQNLSVRYDSSLKPVLKHVNALIAPGQKIGICGRTGSGKSSFSLAFFRMVDTFEGHIIIDGIDIAKLPLHTLRSRLSIILQDPVLFSGTIRFNLDPERKCSDSTLWEALEIAQLKLVVKALPGGLDAIITEGGENFSQGQRQLFCLARAFVRKTSIFIMDEATASIDMATENILQKVVMTAFADRTVVTIAHRVHTILSADLVIVLKRGAILEFDKPEKLLSRKDSVFASFVRADK

SEQ ID NO: 3954 - protein, 1319 aa, Homo sapiens
MWTLGRRAVAGLLASPSPAQAQTLTRVPRPAELAPLCGRRGLRTDIDATCTPRRAVNVAPVAVPSLRKSEDHALQTGHVLDYLCFCLLGFQSASEQRSNPDSVVHRMAGVRSTTLLSSPCEWDWHPGCSSRSKYSRKHRAVPVHGPRCQAPGMEELIWEQYTVTLQKDSKRGFGIAVSGGRDNPHFENGETSIVISDVLPGGPADGLLQENDRVVMVNGTPMEDVLHSFAVQQLRKSGKVAAIVVKRPRKVQVAALQASPPLDQDDRAFEVMDEFDGRSFRSGYSERSRLNSHGGRSRSWEDSPERGRPHERARSRERDLSRDRSRGRSLERGLDQDHARTRDRSRGRSLERGLDHDFGPSRDRDRDRSRGRSIDQDYERAYHRAYDPDYERAYSPEYRRGARHDARSRGPRSRSREHPHSRSPSPEPRGRPGPIGVLLMKSRANEEYGLRLGSQIFVKEMTRTGLATKDGNLHEGDIILKINGTVTENMSLTDARKLIEKSRGKLQLVVLRDSQQTLINIPSLNDSDSEIEDISEIESNRSFSPEERRHQYSDYDYHSSSEKLKERPSSREDTPSRLSRMGATPTPFKSTGDIAGTVVPETNKEPRYQEDPPAPQPKAAPRTFLRPSPEDEAIYGPNTKMVRFKKGDSVGLRLAGGNDVGIFVAGIQEGTSAEQEGLQEGDQILKVNTQDFRGLVREDAVLYLLEIPKGEMVTILAQSRADVYRDILACGRGDSFFIRSHFECEKETPQSLAFTRGEVFRVVDTLYDGKLGNWLAVRIGNELEKGLIPNKSRAEQMASVQNAQRDNAGDRADFWRMRGQRSGVKKNLRKSREDLTAVVSVSTKFPAYERVLLREAGFKRPVVLFGPIADIAMEKLANELPDWFQTAKTEPKDAGSEKSTGVVRLNTVRQIIEQDKHALLDVTPKAVDLLNYTQWFPIVIFFNPDSRQGVKTMRQRLNPTSNKSSRKLFDQANKLKKTCAHLFTATINLNSANDSWFGSLKDTIQHQQGEAVWVSEGKMEGMDDDPEDRMSYLTAMGADYLSCDSRLISDFEDTDGEGGAYTDNELDEPAEEPLVSSITRSSEPVQHEESIRKPSPEPRAQMRRAASSDQLRDNSPPPAFKPEPPKAKTQNKEESYDFSKSYEYKSNPSAVAGNETPGASTKGYPPPVAAKPTFGRSILKPSTPIPPQEGEEVGESSEEQDNAPKSVLGKVKIFEKMDHKARLQRMQELQEAQNARIEIAQKHPDIYAVPIKTHKPDPGTPQHTSSRPPEPQKAPSRPYQDTRGSYGSDAEEEEYRQQLSEHSKRGYYGQSARYRDTEL

SEQ ID NO: 3955 - protein, 808 aa, Homo sapiens
MSQNGYFEDSSYYKCDTDDTFEAREEILGDEAFDTANSSIVSGESIRFFVNVNLEMQATNTENEATSGGCVLLHTSRKYLKLKNFKEEIRAHRDLDGFLAQASIVLNETATSLDNVLRTMLRRFARDPDNNEPNCNLDLLMAMLFTDAGAPMRGKVHLLSDTIQGVTATVTGVRYQQSWLCIICTMKALQKRHVCISRLVRPQNWGENSCEVRFVILVLAPPKMKLLETRTEEEFKEALVHQRQLLTMVSHGPVAPRTKERSTVSLPAHRHPEPPKCKDFVPFGKGIREDIARRFPLYPLDFTDGIIGKNKAVGKYITTTLFLYFACLLPTIAFGSLNDENTDGAIDVQKTIAGQSIGGLLYALFSGQPLVILLTTAPLALYIQVIRVICDDYDLDFNSFYAWTGLWNSFFLALYAFFNLSLVMSLFKRSTEEIIALFISITFVLDAVKGTVKIFWKYYYGHYLDDYHTKRTSSLVSLSGLGASLNASLHTALNASFLASPTELPSATHSGQATAVLSLLIMLGTLWLGYTLYQFKKSPYLHPCVREILSDCALPIAVLAFSLISSHGFREIEMSKFRYNPSESPFAMAQIQSLSLRAVSGAMGLGFLLSMLFFIEQNLVAALVNAPENRLVKGTAYHWDLLLLAIINTGLSLFGLPWIHAAYPHSPLHVRALALVEERVENGHIYDTIVNVKETRLTSLGASVLVGLSLLLLPVPLQWIPKPVLYGLFLYIALTSLDGNQLVQRVALLLKEQVLQLLLLCAFGMSSLPYMKMIFPLIMIAMIPIRYILLPRIIEAKYLDVMDAEHRP

SEQ ID NO: 3956 - protein, 2150 aa, Homo sapiens
MNYSSFLRIWVSFIFALVQHQAQPRELMYPFWQNDTKTPKVDDGSSSEIKLAIPVFFFGVPYRTVYVNNNGVVSFNVLVSQFTPESFPLTDGRAFVAPFWADVHNGIRGEIYYRETMEPAILKRATKDIRKYFKDMATFSATWVFIVTWEEVTFYGGSSTTPVNTFQAVLVSDGSYTFTLFNYYEINWTTGTASGGDPLTGLGGVMAQAGFNGGNLTNFFSLPGSRTPEIVNIQETTNVNVPGRWAFKVDGKEIDPANGCTSRGQFLRRGEVFWDDLNCTVKCRCLDFNNEIYCQEASCSPYEVCEPKGKFFYCSAVETSTCVVFGEPHYHTFDGFLFHFQGSCAYLLARQCLQTSSLPFFSVEAKNEHRRGSAVSWVKELSVEVNGYKILIPKGSYGRVKVNDLVTSLPVTLDLGTVKIYQSGISTAVETDFGLLVTFDGQHYASISVPGSYINSTCGLCGNYNKNPLDDFLRPDGRPAMSVLDLGESWRVYHADWKCDSGCVDNCTQCDAATEALYFGSDYCGFLNKTDGPLWECGTVVDPTAFVHSCVYDLCSVRDNGTLLCQAIQAYALVCQALGIPIGDWRTQTGCVSTVQCPSFSHYSVCTSSCPDTCSDLTASRNCATPCTEGCECNQGFVLSTSQCVPLHKCGCDFDGHYYTMGEFFWATANCTVQCLCEEGGDVYCFNKTCGSGEVCAVEDGYQGCFPKRETVCLLSQNQVLHTFDGASYAFPSEFSYTLLKTCPERPEYLEIDINKKKPDAGPAWLRGLRILVADQEVKIGGIGASEVKLNGQEVELPFFHPSGKLEIYRNKNSTTVESKGVVTVQYSDIGLLYIRLSTTYFNCTGGLCGFYNANASDEFCLPNGKCTDNLAVFLESWTTFEEICNGECGDLLKACNNDSELLKFYRSRSRCGIINDPSNSSFLECHGVVNVTAYYRTCLFRLCQSGGNESELCDSVARYASACKNADVEVGPWRTYDFCPLECPENSHFEECITCTETCETLTLGPICVDSCSEGCQCDEGYALLGSQCVTRSECGCNFEGHQLATNETFWVDLDCQIFCYCSGTDNRVHCETIPCKDDEYCMEEGGLYYCQARTDASCIVSGYGHYLTFDGFPFDFQTSCPLILCTTGSRPSSDSFPKFVVTAKNEDRDPSLALWVKQVDVTVFGYSIVIHRAYKHTVLVNSERLYLPLKLGQGKINIFSFGFHVVVETDFGLKVVYDWKTFLSITVPRSMQNSTYGLCGRYNGNPDDDLEMPMGLLASSVNEFGQSWVKRDTFCQVGCGDRCPSCAKVEGFSKVQQLCSLIPNQNAAFSKCHSKVNPTFFYKNCLFDSCIDGGAVQTACSWLQNYASTCQTQGITVTGWRNYTSCTVTCPPNSHYESCVSVCQPRCAAIRLKSDCSHYCVEGCHCDAGYVLNGKSCILPHSCGCYSDGKYYEPKQLFWNSDCTRRCRCFRRNVIQCDPRQCKSDEECALRNGVRGCFSTKTSYCLAAGGGVFRTFDGAFLRFPANCAFVLSTICQKLPDISFQLIINFDKWSAPNLTIISPVYFYINEEQILINDRNTVKVNGTQVNVPFITGLATKIYSSEGFLVIDTSPDIQIYYNGFNVIKISISERLQNKVCGLCGNFNGDLTDDYVTLRGKPVVSSVVLAQSWKTNGMQKSCNELQFSQYAAMCDNVHIQKMQGDGYCLKLTDMKGFFQPCYGLLDPLPFYESCYLDGCYSHKKFQLCGSLAAYGEACRSFGILSTEWIEKENCSGVVEDPCVGADCPNRTCELGNGRELCGCIEPPPYGNNSHDIIDAEVTCKAAQMEVSISKCKLFQLGFEREGVRINDRQCTGIEGEDFISFQINNTKGNCGNIVQSNGTHIMYKNTLWIESANNTGNIITRDRTINVEFSCAYELDIKISLDSVVKPMLSVINLTVPTQEGSFITKMALYKNASYKHPYRQGEVVLTTRDVLYVGVFVVGADATHLILTLNKCYATPTRDSNDKLRYFIIEGGCQNLKDNTIGIEENAVSLTCRFHVTVFKFIGDYDEVHLHCAVSLCDSEKYSCKITCPHNSRIATDYTKEPKEQIISVGPIRRKRLDWCEDNGGCEQICTSRVDGPLCSCVTGTLQEDGKSCRASNSSMELQVWTLLLIMIQISLWHFVYKSGTTS

SEQ ID NO: 3957 - protein, 968 aa, Homo sapiens
MSLKPQQQQQQQQQQQQQQQQQQQQQQQPPPAAANVRKPGGSGLLASPAAAPSPSSSSVSSSSATAPSSVVAATSGGGRPGLGRGRNSNKGLPQSTISFDGIYANMRMVHILTSVVGSKCEVQVKNGGIYEGVFKTYSPKCDLVLDAAHEKSTESSSGPKREEIMESILFKCSDFVVVQFKDMDSSYAKRDAFTDSAISAKVNGEHKEKDLEPWDAGELTANEELEALENDVSNGWDPNDMFRYNEENYGVVSTYDSSLSSYTVPLERDNSEEFLKREARANQLAEEIESSAQYKARVALENDDRSEEEKYTAVQRNSSEREGHSINTRENKYIPPGQRNREVISWGSGRQNSPRMGQPGSGSMPSRSTSHTSDFNPNSGSDQRVVNGGVPWPSPCPSPSSRPPSRYQSGPNSLPPRAATPTRPPSRPPSRPSRPPSHPSAHGSPAPVSTMPKRMSSEGPPRMSPKAQRHPRNHRVSAGRGSISSGLEFVSHNPPSEAATPPVARTSPSGGTWSSVVSGVPRLSPKTHRPRSPRQNSIGNTPSGPVLASPQAGIIPTEAVAMPIPAASPTPASPASNRAVTPSSEAKDSRLQDQRQNSPAGNKENIKPNETSPSFSKAENKGISPVVSEHRKQIDDLKKFKNDFRLQPSSTSESMDQLLNKNREGEKSRDLIKDKIEPSAKDSFIENSSSNCTSGSSKPNSPSISPSILSNTEHKRGPEVTSQGVQTSSPACKQEKDDKEEKKDAAEQVRKSTLNPNAKEFNPRSFSQPKPSTTPTSPRPQAQPSPSMVGHQQPTPVYTQPVCFAPNMMYPVPVSPGVQPLYPIPMTPMPVNQAKTYRAVKYLELELLRYVPNMPQQRQDQHHQSAMMHPASAAGPPIAATPPAYSTQYVAYSPQQFPNQPLVQHVPHYQSQHPHVYSPVIQGNARMMAPPTHAQPGLVSSSATQYGAHEQTHAMYGRKHFVCLFQCV

SEQ ID NO: 3958 - protein, 171 aa, Homo sapiens
MEERGDSEPTPGCSGLGPGGVRGFGDGGGAPSWAPEDAWMGTHPKYLEMMELDIGDATQVYVAFLVYLDLMESKSWHEVNCVGLPELQLICLVGTEIEGEGLQTVVPTPITASLSHNRIREILKASRKLQGDPDLPMSFTLAIVESDSTIVYYKLTDGFMLPDPQNISLRR

SEQ ID NO: 3959 - protein, 1315 aa, Homo sapiens
MSGPTDETAGDLPVKDTGLNLFGMGGLQETSTTRTMKSRQAVSRVSREELEDRFLRLHDENILLKQHARKQEDKIKRMATKLIRLVNDKKRYERVGGGPKRLGRDVEMEEMIEQLQEKVHELEKQNETLKNRLISAKQQLQTQGYRQTPYNNVQSRINTGRRKANENAGLQECPRKGIKFQDADVAETPHPMFTKYGNSLLEEARGEIRNLENVIQSQRGQIEELEHLAEILKTQLRRKENEIELSLLQLREQQATDQRSNIRDNVEMIKLHKQLVEKSNALSAMEGKFIQLQEKQRTLRISHDALMANGDELNMQLKEQRLKCCSLEKQLHSMKFSERRIEELQDRINDLEKERELLKENYDKLYDSAFSAAHEEQWKLKEQQLKVQIAQLETALKSDLTDKTEILDRLKTERDQNEKLVQENRELQLQYLEQKQQLDELKKRIKLYNQENDINADELSEALLLIKAQKEQKNGDLSFLVKVDSEINKDLERSMRELQATHAETVQELEKTRNMLIMQHKINKDYQMEVEAVTRKMENLQQDYELKVEQYVHLLDIRAARIHKLEAQLKDIAYGTKQYKFKPEIMPDDSVDEFDETIHLERGENLFEIHINKVTFSSEVLQASGDKEPVTFCTYAFYDFELQTTPVVRGLHPEYNFTSQYLVHVNDLFLQYIQKNTITLEVHQAYSTEYETIAACQLKFHEILEKSGRIFCTASLIGTKGDIPNFGTVEYWFRLRVPMDQAIRLYRERAKALGYITSNFKGPEHMQSLSQQAPKTAQLSSTDSTDGNLNELHITIRCCNHLQSRASHLQPHPYVVYKFFDFADHDTAIIPSSNDPQFDDHMYFPVPMNMDLDRYLKSESLSFYVFDDSDTQENIYIGKVNVPLISLAHDRCISGIFELTDHQKHPAGTIHVILKWKFAYLPPSGSITTEDLGNFIRSEEPEVVQRLPPASSVSTLVLAPRPKPRQRLTPVDKKVSFVDIMPHQSDETSPPPEDRKEISPEVEHIPEIEINMLTVPHVPKVSQEGSVDEVKENTEKMQQGKDDVSLLSEGQLAEQSLASSEDETEITEDLEPEVEEDMSASDSDDCIIPGPISKNIKQSLALSPGLGCSSAISAHCNFRLPGSSDFPASASQVDGITGACHHTQPSEKIRIEIIALSLNDSQVTMDDTIQRLFVECRFYSLPAEETPVSLPKPKSGQWVYYNYSNVIYVDKENNKAKRDILKAILQKQEMPNRSLRFTVVSDPPEDEQDLECEDIGVAHVDLADMFQEGRDLIEQNIDVFDARADGEGIGKLRVTVEALHALQSVYKQYRDDLEA

SEQ ID NO: 3960 - protein, 599 aa, Homo sapiens
MAFPHRPDAPELPDFSMLKRLARDQLIYLLEQLPGKKDLFIEADLMSPLDRIANVSILKQHEVDKLYKVENKPALSSNEQLCFLVRPRIKNMRYIASLVNADKLAGRTRKYKVIFSPQKFYACEMVLEEEGIYGDVSCDEWAFSLLPLDVDLLSMELPEFFRDYFLEGDQRWINTVAQALHLLSTLYGPFPNCYGIGRCAKMAYELWRNLEEEEDGETKGRRPEIGHIFLLDRDVDFVTALCSQVVYEGLVDDTFRIKCGSVDFGPEVTSSDKSLKVLLNAEDKVFNEIRNEHFSNVFGFLSQKARNLQAQYDRRRGMDIKQMKNFVSQELKGLKQEHRLLSLHIGACESIMKKKTKQDFQELIKTEHALLEGFNIRESTSYIEEHIDRQVSPIESLRLMCLLSITENGLIPKDYRSLKTQYLQSYGPEHLLTFSNLRRAGLLTEQAPGDTLTAVESKVSKLVTDKAAGKITDAFSSLAKRSNFRAISKKLNLIPRVDGEYDLKVPRDMAYVFGGAYVPLSCRIIEQVLERRSWQGLDEVVRLLNCSDFAFTDMTKEDKASSESLRLILVVFLGGCTFSEISALRFLGREKVRCWRRSP

SEQ ID NO: 3961 - protein, 1860 aa, Homo sapiens
MTRLSWCFSCVIRWGKYLFSCLLPLRFCLRSQPEDLEAPKTHRFKVKTFKKVKPCGICRQVITQEGCTCKVCSFSCHRKCQAKVAAPCVPPSNHELVPITTENAPKNVVDKGEGASRGGNTRKSLEDNGSTRVTPSVQPHLQPIRNMSVSRTMEDSCELDLVYVTERIIAVSFPSTANEENFRSNLREVAQMLKSKHGGNYLLFNLSERRPDITKLHAKVLEFGWPDLHTPALEKICSICKAMDTWLNADPHNVVVLHNKGNRGRIGVVIAAYMHYSNISASADQALDRFAMKRFYEDKIVPIGQPSQRRYVHYFSGLLSGSIKMNNKPLFLHHVIMHGIPNFESKGGCRPFLRIYQAMQPVYTSGIYNIPGDSQTSVCITIEPGLLLKGDILLKCYHKKFRSPARDVIFRVQFHTCAIHDLGVVFGKEDLDDAFKDDRFPEYGKVEFVFSYGPEKIQGMEHLENGPSVSVDYNTSDPLIRWDSYDNFSGHRDDGMEEVVGHTQGPLDGSLYAKVKKKDSLHGSTGAVNATRPTLSATPNHVEHTLSVSSDSGNSTASTKTDKTDEPVPGASSATAALSPQEKRELDRLLSGFGLEREKQGAMYHTQHLRSRPAGGSAVPSSGRHVVPAQVHVNGGALASERETDILDDELPNQDGHSAGSMGTLSSLDGVTNTSEGGYPEALSPLTNGLDKSYPMEPMVNGGGYPYESASRAGPAHAGHTAPMRPSYSAQEGLAGYQREGPHPAWPQPVTTSHYAHDPSGMFRSQSFSEAEPQLPPAPVRGGSSREAVQRGLNSWQQQQQQQQQPRPPPRQQERAHLESLVASRPSPQPLAETPIPSLPEFPRAASQQEIEQSIETLNMLMLDLEPASAAAPLHKSQSVPGAWPGASPLSSQPLSGSSRQSHPLTQSRSGYIPSGHSLGTPEPAPRASLESVPPGRSYSPYDYQPCLAGPNQDFHSKSPASSSLPAFLPTTHSPPGPQQPPASLPGLTAQPLLSPKEATSDPSRTPEEEPLNLEGLVAHRVAGVQAREKQPAEPPAPLRRRAASDGQYENQSPEATSPRSPGVRSPVQCVSPELALTIALNPGGRPKEPHLHSYKEAFEEMEGTSPSSPPPSGVRSPPGLAKTPLSALGLKPHNPADILLHPTGEPRSYVESVARTAVAGPRAQDSEPKSFSAPATQAYGHEIPLRNGTLGGSFVSPSPLSTSSPILSADSTSVGSFPSGESSDQGPRTPTQPLLESGFRSGSLGQPSPSAQRNYQSSSPLPTVGSSYSSPDYSLQHFSSSPESQARAQFSVAGVHTVPGSPQARHRTVGTNTPPSPGFGWRAINPSMAAPSSPSLSHHQMMGPPGTGFHGSTVSSPQSSAATTPGSPSLCRHPAGVYQVSGLHNKVATTPGSPSLGRHPGAHQGNLASGLHSNAIASPGSPSLGRHLGGSGSVVPGSPCLDRHVAYGGYSTPEDRRPTLSRQSSASGYQAPSTPSFPVSPAYYPGLSSPATSPSPDSAAFRQGSPTPALPEKRRMSVGDRAGSLPNYATINGKVSSPVASGMSSPSGGSTVSFSHTLPDFSKYSMPDNSPETRAKVKFVQDTSKYWYKPEISREQAIALLKDQEPGAFIIRDSHSFRGAYGLAMKVSSPPPTIMQQNKKGDMTHELVRHFLIETGPRGVKLKGCPNEPNFGSLSALVYQHSIIPLALPCKLVIPNRDPTDESKDSSGPANSTADLLKQGAACNVLFVNSVDMESLTGPQAISKATSETLAADPTPAATIVHFKVSAQGITLTDNQRKLFFRRHYPLNTVTFCDLDPQERKWMKTEGGAPAKLFGFVARKQGSTTDNACHLFAELDPNQPASAIVNFVSKVMLNAGQKR

SEQ ID NO: 3962 - protein, 644 aa, Homo sapiens
MKLITILFLCSRLLLSLTQESQSEEIDCNDKDLFKAVDAALKKYNSQNQSNNQFVLYRITEATKTVGSDTFYSFKYEIKEGDCPVQSGKTWQDCEYKDAAKAATGECTATVGKRSSTKFSVATQTCQITPAEGPVVTAQYDCLGCVHPISTQSPDLEPILRHGIQYFNNNTQHSSLFMLNEVKRAQRQVVAGLNFRITYSIVQTNCSKENFLFLTPDCKSLWNGDTGECTDNAYIDIQLRIASFSQNCDIYPGKDFVQPPTKICVGCPRDIPTNSPELEETLTHTITKLNAENNATFYFKIDNVKKARVQVVAGKKYFIDFVARETTCSKESNEELTESCETKKLGQSLDCNAEVYVVPWEKKIYPTVNCQPLGMISLMKRPPGFSPFRSSRIGEIKEETTVSPPHTSMAPAQDEERDSGKEQGHTRRHDWGHEKQRKHNLGHGHKHERDQGHGHQRGHGLGHGHEQQHGLGHGHKFKLDDDLEHQGGHVLDHGHKHKHGHGHGKHKNKGKKNGKHNGWKTEHLASSSEDSTTPSAQTQEKTEGPTPIPSLAKPGVTVTFSDFQDSDLIATMMPPISPAPIQSDDDWIPDIQIDPNGLSFNPISDFPDTTSPKCPGRPWKSVSEINPTTQMKESYYFDLTDGLS

SEQ ID NO: 3963 - protein, 397 aa, Homo sapiens
MFKLRNSSSPATGEDPEGSDILNYFESYLAVASTVPSMLCLVANFLLVNRVAVHIRVLASLTVILAIFMVITALVKVDTSSWTRGFFAVTIVCMVILSGASTVFSSSIYGMTGSFPMRNSQALISGGAMGGTVSAVASLVDLAASSDVRNSALAFFLTATVFLVLCMGLYLLLSRLEYARYYMRPVLAAHVFSGEEELPQDSLSAPSVASRFIDSHTPPLRPILKKTASLGFCVTYVFFITSLIYPAICTNIESLNKGSGSLWTTKFFIPLTTFLLYNFADLCGRQLTAWIQVPGPNSKALPGFVLLRTCLIPLFVLCNYQPRVHLKTVVFQSDVYPALLSSLLGLSNGYLSTLALLYGPKIVPRELAEATGVVMSFYVCLGLTLGSACSTLLVHLI

SEQ ID NO: 3964 - protein, 1570 aa, Homo sapiens
MPLAFCGSENHSAAYRVDQGVLNNGCFVDALNVVPHVFLLFITFPILFIGWGSQSSKVHIHHSTWLHFPGHNLRWILTFMLLFVLVCEIAEGILSDGVTESHHLHLYMPAGMAFMAAVTSVVYYHNIETSNFPKLLIALLVYWTLAFITKTIKFVKFLDHAIGFSQLRFCLTGLLVILYGMLLLVEVNVIRVRRYIFFKTPREVKPPEDLQDLGVRFLQPFVNLLSKGTYWWMNAFIKTAHKKPIDLRAIGKLPIAMRALTNYQRLCEAFDAQRKDIQGTQGARAIWQALSHAFGRRLVLSSTFRILADLLGFAGPLCIFGIVDHLGKENDVFQPKTQFLGVYFVSSQEFLANAYVLAVLLFLALLLQRTFLQASYYVAIETGINLRGAIQTKIYNKIMHLSTSNLSMGEMTAGQICNLVAIDTNQLMWFFFLCPNLWAMPVQIIVGVILLYYILGVSALIGAAVIILLAPVQYFVATKLSQAQRSTLEYSNERLKQTNEMLRGIKLLKLYAWENIFRTRVETTRRKEMTSLRAFAIYTSISIFMNTAIPIAAVLITFVGHVSFFKEADFSPSVAFASLSLFHILVTPLFLLSSVVRSTVKALVSVQKLSEFLSSAEIREEQCAPHEPTPQGPASKYQAVPLRVVNRKRPAREDCRGLTGPLQSLVPSADGDADNCCVQIMGGYFTWTPDGIPTLSNITIRIPRGQLTMIVGQVGCGKSSLLLAALGEMQKVSGAVFWSSLPDSEIGEDPSPERETATDLDIRKRGPVAYASQKPWLLNATVEENIIFESPFNKQRYKMVIEACSLQPDIDILPHGDQTQIGERGINLSGGQRQRISVARALYQHANVVFLDDPFSALDIHLSDHLMQAGILELLRDDKRTVVLVTHKLQYLPHADWIIAMKDGTIQREGTLKDFQRSECQLFEHWKTLMNRQDQELEKETVTERKATEPPQGLSRAMSSRDGLLQDEEEEEEEAAESEEDDNLSSMLHQRAEIPWRACAKYLSSAGILLLSLLVFSQLLKHMVLVAIDYWLAKWTDSALTLTPAARNCSLSQECTLDQTVYAMVFTVLCSLGIVLCLVTSVTVEWTGLKVAKRLHRSLLNRIILAPMRFFETTPLGSILNRFSSDCNTIDQHIPSTLECLSRSTLLCVSALAVISYVTPVFLVALLPLAIVCYFIQKYFRVASRDLQQLDDTTQLPLLSHFAETVEGLTTIRAFRYEARFQQKLLEYTDSNNIASLFLTAANRWLEVRMEYIGACVVLIAAVTSISNSLHRELSAGLVGLGLTYALMVSNYLNWMVRNLADMELQLGAVKRIHGLLKTEAESYEGLLDQGKIQIQNLSVRYDSSLKPVLKHVNALIAPGQKIGICGRTGSGKSSFSLAFFRMVDTFEGHIIIDGIDIAKLPLHTLRSRLSIILQDPVLFSGTIRFNLDPERKCSDSTLWEALEIAQLKLVVKALPGGLDAIITEGGENFSQGQRQLFCLARAFVRKTSIFIMDEATASIDMATENILQKVVMTAFADRTVVTIAHRVHTILSADLVIVLKRGAILEFDKPEKLLSRKDSVFASFVRADK

SEQ ID NO: 3965 - protein, 151 aa, Homo sapiens
LAAQGESQSLEDLSNTSRPTSEVYKISFIFPNGDKYDGDCTRTSSGIYERNGIGIHTTPNGIVYTGSWKDDKMNGFGRLEHFSGAVYEGQFKDNMFHGLGTYTFPNGAKYTGNFNENRVEGEGEYTDIQGLEWSGNFHFTAAPDLKLKLHM

SEQ ID NO: 3966 - protein, 465 aa, Homo sapiens
MDSPGYNCFVDKDKMDAAIQDLGPKELSCTELQELKQLARQGYWAQSHALRGKVYQRLIRDIPCRTVTPDASVYSDIVGKIVGKHSSSCLPLPEFVDNTQVPSYCLNARGEGAVRKILLCLANQFPDISFCPALPAVVALLLHYSIDEAECFEKACRILACNDPGRRLIDQSFLAFESSCMTFGDLVNKYCQAAHKLMVAVSEDVLQVYADWQRWLFGELPLCYFARVFDVFLVEGYKVLYRVALAILKFFHKVRAGQPLESDSVKQDIRTFVRDIAKTVSPEKLLEKAFAIRLFSRKEIQLLQMANEKALKQKGITVKQKRQFVHLAVHAENFRSEIVSVREMRDIWSWVPERFALCQPLLLFSSLQHGYSLARFYFQCEGHEPTLLLIKTTQKEVCGAYLSTDWSERNKFGGKLGFFGTGECFVFRLQPEVQRYEWVVIKHPELTKPPPLMAAEPTAPLSHSA

SEQ ID NO: 3967 - protein, 474 aa, Homo sapiens
MALAVAPWGRQWEEARALGRAVRMLQRLEEQCVDPRLSVSPPSLRDLLPRTAQLLREVAHSRRAAGGGGPGGPGGSGDFLLIYLANLEAKSRQVAALLPPRGRRSANDELFRAGSRLRRQLAKLAIIFSHMHAELHALFPGGKYCGHMYQLTKAPAHTFWRESCGARCVLPWAEFESLLGTCHPVEPGCTALALRTTIDLTCSGHVSIFEFDVFTRLFQPWPTLLKNWQLLAVNHPGYMAFLTYDEVQERLQACRDKPGSYIFRPSCTRLGQWAIGYVSSDGSILQTIPANKPLSQVLLEGQKDGFYLYPDGKTHNPDLTELGQAEPQQRIHVSEEQLQLYWAMDSTFELCKICAESNKDVKIEPCGHLLCSCCLAAWQHSDSQTCPFCRCEIKGWEAVSIYQFHGQATAEDSGNSSDQEGRELELGQVPLSAPPLPPRPDLPPRKPRNAQPKVRLLKGNSPPAALGPQDPAPA

SEQ ID NO: 3968 - protein, 335 aa, Homo sapiens
MDNARMNSFLEYPILSSGDSGTCSARAYPSDHRITTFQSCAVSANSCGGDDRFLVGRGVQIGSPHHHHHHHHRHPQPATYQTSGNLGVSYSHSSCGPSYGSQNFSAPYSPYALNQEADVSGGYPQCAPAVYSGNLSSPMVQHHHHHQGYAGGAVGSPQYIHHSYGQEHQSLALATYNNSLSPLHASHQEACRSPASETSSPAQTFDWMKVKRNPPKTGKVGEYGYLGQPNAVRTNFTTKQLTELEKEFHFNKYLTRARRVEIAASLQLNETQVKIWFQNRRMKQKKREKEGLLPISPATPPGNDEKAEESSEKSSSSPCVPSPGSSTSDTLTTSH

SEQ ID NO: 3969 - protein, 1882 aa, Homo sapiens
MPENPATDKLQVLQVLDRLKMKLQEKGDTSQNEKLSMFYETLKSPLFNQILTLQQSIKQLKGQLNHIPSDCSANFDFSRKGLLVFTDGSITNGNVHRPSNNSTVSGLFPWTPKLGNEDFNSVIQQMAQGRQIEYIDIERPSTGGLGFSVVALRSQNLGKVDIFVKDVQPGSVADRDQRLKENDQILAINHTPLDQNISHQQAIALLQQTTGSLRLIVAREPVHTKSSTSSSLNDTTLPETVCWGHVEEVELINDGSGLGFGIVGGKTSGVVVRTIVPGGLADRDGRLQTGDHILKIGGTNVQGMTSEQVAQVLRNCGNSVRMLVARDPAGDISVTPPAPAALPVALPTVASKGPGSDSSLFETYNVELVRKDGQSLGIRIVGYVGTSHTGEASGIYVKSIIPGSAAYHNGHIQVNDKIVAVDGVNIQGFANHDVVEVLRNAGQVVHLTLVRRKTSSSTSPLEPPSDRGTVVEPLKPPALFLTGAVETETNVDGEDEEIKERIDTLKNDNIQALEKLEKVPDSPENELKSRWENLLGPDYEVMVATLDTQIADDAELQKYSKLLPIHTLRLGVEVDSFDGHHYISSIVSGGPVDTLGLLQPEDELLEVNGMQLYGKSRREAVSFLKEVPPPFTLVCCRRLFDDEASVDEPRRTETSLPETEVDHNMDVNTEEDDDGELALWSPEVKIVELVKDCKGLGFSILDYQDPLDPTRSVIVIRSLVADGVAERSGGLLPGDRLVSVNEYCLDNTSLAEAVEILKAVPPGLVHLGICKPLVEDNEEESCYILHSSSNEDKTEFSGTIHDINSSLILEAPKGFRDEPYFKEELVDEPFLDLGKSFHSQQKEIEQSKEAWEMHEFLTPRLQEMDEEREILVDEEYELYQDPSPSMELYPLSHIQEATPVPSVNELHFGTQWLHDNEPSESQEARTGRTVYSQEAQPYGYCPENVMKENFVMESLPSVPSTEGNSQQGRFDDLENLNSLAKTSLDLGMIPNDVQGPSLLIDLPVVAQRREQEDLPLYQHQATRVISKASAYTGMLSSRYATDTCELPEREEGEGEETPNFSHWGPPRIVEIFREPNVSLGISIVGGQTVIKRLKNGEELKGIFIKQVLEDSPAGKTNALKTGDKILEVSGVDLQNASHSEAVEAIKNAGNPVVFIVQSLSSTPRVIPNVHNKANKITGNQNQDTQEKKEKRQGTAPPPMKLPPPYKALTDDSDENEEEDAFTDQKIRQRYADLPGELHIIELEKDKNGLGLSLAGNKDRSRMSIFVVGINPEGPAAADGRMRIGDELLEINNQILYGRSHQNASAIIKTAPSKVKLVFIRNEDAVNQMAVTPFPVPSSSPSSIEDQSGTEPISSEEDGSVEVGIKQLPESESFKLAVSQMKQQKYPTKVSFSSQEIPLAPASSYHSTDADFTGYGGFQAPLSVDPATCPIVPGQEMIIEISKGRSGLGLSIVGGKDTPLNAIVIHEVYEEGAAARDGRLWAGDQILEVNGVDLRNSSHEEAITALRQTPQKVRLVVYRDEAHYRDEENLEIFPVDLQKKAGRGLGLSIVGKRNGSGVFISDIVKGGAADLDGRLIQGDQILSVNGEDMRNASQETVATILKCAQGLVQLEIGRLRAGSWTSARTTSQNSQGSQQSAHSSCHPSFAPVITGLQNLVGTKRVSDPSQKNSGTDMEPRTVEINRELSDALGISIAGGRGSPLGDIPVFIAMIQASGVAARTQKLKVGDRIVSINGQPLDGLSHADVVNLLKNAYGRIILQVVADTNISAIAAQLENMSTGYHLGSPTAEHHPEDTETPPPKIITLEKGSEGLGFSIVGGYGSPHGDLPIYVKTVFAKGAAADDGRLKRGDQILAVNGETLEGVTHEQAVAILKHQRGTVTLTVLS

SEQ ID NO: 3970 - protein, 1603 aa, Homo sapiens
MPLAFCGSENHSAAYRVDQGVLNNGCFVDALNVVPHVFLLFITFPILFIGWGSQSSKVHIHHSTWLHFPGHNLRWILTFMLLFVLVCEIAEGILSDGVTESHHLHLYMPAGMAFMAAVTSVVYYHNIETSNFPKLLIALLVYWTLAFITKTIKFVKFLDHAIGFSQLRFCLTGLLVILYGMLLLVEVNVIRVRRYIFFKTPREVKPPEDLQDLGVRFLQPFVNLLSKGTYWWMNAFIKTAHKKPIDLRAIGKLPIAMRALTNYQRLCEAFDAQVRKDIQGTQGARAIWQALSHAFGRRLVLSSTFRILADLLGFAGPLCIFGIVDHLGKENDVFQPKTQFLGVYFVSSQEFLANAYVLAVLLFLALLLQRTFLQASYYVAIETGINLRGAIQTKIYNKIMHLSTSNLSMGEMTAGQICNLVAIDTNQLMWFFFLCPNLWAMPVQIIVGVILLYYILGVSALIGAAVIILLAPVQYFVATKLSQAQRSTLEYSNERLKQTNEMLRGIKLLKLYAWENIFRTRVETTRRKEMTSLRAFAIYTSISIFMNTAIPIAAVLITFVGHVSFFKEADFSPSVAFASLSLFHILVTPLFLLSSVVRSTVKALVSVQKLSEFLSSAEIREEQCAPHEPTPQGPASKYQAVEEGLPSLHSSQPSGSSPPNHPQPLRVVNRKRPAREDCRGLTGPLQSLVPSADGDADNCCVQIMGGYFTWTPDGIPTLSNITIRIPRGQLTMIVGQVGCGKSSLLLAALGEMQKVSGAVFWSSLPDSEIGEDPSPERETATDLDIRKRGPVAYASQKPWLLNATVEENIIFESPFNKQRYKMVIEACSLQPDIDILPHGDQTQIGERGINLSGGQRQRISVARALYQHANVVFLDDPFSALDIHLSDHLMQAGILELLRDDKRTVVLVTHKLQYLPHADWIIAMKDGTIQREGTLKDFQRSECQLFEHWKTLMNRQDQELEKETVTERKATEPPQGLSRAMSSRDGLLQDEEEEEEEAAESEEDDNLSSMLHQRAEIPWRACAKYLSSAGILLLSLLVFSQLLKHMVLVAIDYWLAKWTDSALTLTPAARNCSLSQECTLDQTVYAMVFTVLCSLGIVLCLVTSVTVEWTGLKVAKRLHRSLLNRIILAPMRFFETTPLGSILNRFSSDCNTIDQHIPSTLECLSRSTLLCVSALAVISYVTPVFLVALLPLAIVCYFIQKYFRVASRDLQQLDDTTQLPLLSHFAETVEGLTTIRAFRYEARFQQKLLEYTDSNNIASLFLTAANRWLEVRMEYIGACVVLIAAVTSISNSLHRELSAGLVGLGLTYALMVSNYLNWMVRNLADMELQLGAVKRIHGLLKTEAESYEGLLAPSLIPKNWPDQGKIQIQNLSVRYDSSLKPVLKHVNALIAPGQKIGICGRTGSGKSSFSLAFFRMVDTFEGHIIIDGIDIAKLPLHTLRSRLSIILQDPVLFSGTIRFNLDPERKCSDSTLWEALEIAQLKLVVKALPGGLDAIITEGGENFSQGQRQLFCLARAFVRKTSIFIMDEATASIDMATENILQKVVMTAFADRTVVTIAHRVHTILSADLVIVLKRGAILEFDKPEKLLSRKDSVFASFVRADK

SEQ ID NO: 3971 - protein, 297 aa, Homo sapiens
IGKLPIAMRALTNYQRLCEAFDAQRKDIQGTQGARAIWQALSHAFGRRLVLSSTFRILADLLGFAGPLCIFGIVDHLGKENDVFQPKTQFLGVYFVSSQEFLANAYVLAVLLFLALLLQRTFLQASYYVAIETGINLRGAIQTKIYNKIMHLSTSNLSMGEMTAGQICNLVAIDTNQLMWFFFLCPNLWAMPVQIIVGVILLYYILGVSALIGAAVIILLAPVQYFVATKLSQAQRSTLEYSNERLKQTNEMLRGIKLLKLYAWENIFRTRVETTRRKEMTSLRAFAIYTSISTCKS

SEQ ID NO: 3972 - protein, 453 aa, Homo sapiens
MGENDPPAVEAPFSFRSLFGLDDLKISPVAPDADAVAAQILSLLPLKFFPIIVIGIIALILALAIGLGIHFDCSGKYRCRSSFKCIELIARCDGVSDCKDGEDEYRCVRVGGQNAVLQVFTAASWKTMCSDDWKGHYANVACAQLGFPSYVSSDNLRVSSLEGQFREEFVSIDHLLPDDKVTALHHSVYVREGCASGHVVTLQCTACGHRRGYSSRIVGGNMSLLSQWPWQASLQFQGYHLCGGSVITPLWIITAAHCVYDLYLPKSWTIQVGLVSLLDNPAPSHLVEKIVYHSKYKPKRLGNDIALMKLAGPLTFNEMIQPVCLPNSEENFPDGKVCWTSGWGATEDGGDASPVLNHAAVPLISNKICNHRDVYGGIISPSMLCAGYLTGGVDSCQGDSGGPLVCQERRLWKLVGATSFGIGCAEVNKPGVYTRVTSFLDWIHEQMERDLKT

SEQ ID NO: 3973 - protein, 1581 aa, Homo sapiens
MPLAFCGSENHSAAYRVDQGVLNNGCFVDALNVVPHVFLLFITFPILFIGWGSQSSKVHIHHSTWLHFPGHNLRWILTFMLLFVLVCEIAEGILSDGVTESHHLHLYMPAGMAFMAAVTSVVYYHNIETSNFPKLLIALLVYWTLAFITKTIKFVKFLDHAIGFSQLRFCLTGLLVILYGMLLLVEVNVIRVRRYIFFKTPREVKPPEDLQDLGVRFLQPFVNLLSKGTYWWMNAFIKTAHKKPIDLRAIGKLPIAMRALTNYQRLCEAFDAQRKDIQGTQGARAIWQALSHAFGRRLVLSSTFRILADLLGFAGPLCIFGIVDHLGKENDVFQPKTQFLGVYFVSSQEFLANAYVLAVLLFLALLLQRTFLQASYYVAIETGINLRGAIQTKIYNKIMHLSTSNLSMGEMTAGQICNLVAIDTNQLMWFFFLCPNLWAMPVQIIVGVILLYYILGVSALIGAAVIILLAPVQYFVATKLSQAQRSTLEYSNERLKQTNEMLRGIKLLKLYAWENIFRTRVETTRRKEMTSLRAFAIYTSISIFMNTAIPIAAVLITFVGHVSFFKEADFSPSVAFASLSLFHILVTPLFLLSSVVRSTVKALVSVQKLSEFLSSAEIREEQCAPHEPTPQGPASKYQAVPLRVVNRKRPAREDCRGLTGPLQSLVPSADGDADNCCVQIMGGYFTWTPDGIPTLSNITIRIPRGQLTMIVGQVGCGKSSLLLAALGEMQKVSGAVFWSSSLPDSEIGEDPSPERETATDLDIRKRGPVAYASQKPWLLNATVEENIIFESPFNKQRYKMVIEACSLQPDIDILPHGDQTQIGERGINLSGGQRQRISVARALYQHANVVFLDDPFSALDIHLSDHLMQAGILELLRDDKRTVVLVTHKLQYLPHADWIIAMKDGTIQREGTLKDFQRSECQLFEHWKTLMNRQDQELEKETVTERKATEPPQGLSRAMSSRDGLLQDEEEEEEEAAESEEDDNLSSMLHQRAEIPWRACAKYLSSAGILLLSLLVFSQLLKHMVLVAIDYWLAKWTDSALTLTPAARNCSLSQECTLDQTVYAMVFTVLCSLGIVLCLVTSVTVEWTGLKVAKRLHRSLLNRIILAPMRFFETTPLGSILNRFSSDCNTIDQHIPSTLECLSRSTLLCVSALAVISYVTPVFLVALLPLAIVCYFIQKYFRVASRDLQQLDDTTQLPLLSHFAETVEGLTTIRAFRYEARFQQKLLEYTDSNNIASLFLTAANRWLEVRMEYIGACVVLIAAVTSISNSLHRELSAGLVGLGLTYALMVSNYLNWMVRNLADMELQLGAVKRIHGLLKTEAESYEGLLAPSLIPKNWPDQGKIQIQNLSVRYDSSLKPVLKHVNALIAPGQKIGICGRTGSGKSSFSLAFFRMVDTFEGHIIIDGIDIAKLPLHTLRSRLSIILQDPVLFSGTIRFNLDPERKCSDSTLWEALEIAQLKLVVKALPGGLDAIITEGGENFSQGQRQLFCLARAFVRKTSIFIMDEATASIDMATENILQKVVMTAFADRTVVTIAHRVHTILSADLVIVLKRGAILEFDKPEKLLSRKDSVFASFVRADK

SEQ ID NO: 3974 - protein, 46 aa, Homo sapiens
MEERGDSEPTPGCSGLGPGGVRGFGDGGGAPSWAPEDAWMGTHPKK

SEQ ID NO: 3975 - protein, 1920 aa, Homo sapiens
MASGLGSPSPCSAGSEEEDMDALLNNSLPPPHPENEEDPEEDLSETETPKLKKKKKPKKPRDPKIPKSKRQKKELGDSSGEGPEFVEEEEEVALRSDSEGSDYTPGKKKKKKLGPKKEKKSKSKRKEEEEEEDDDDDSKEPKSSAQLLEDWGMEDIDHVFSEEDYRTLTNYKAFSQFVRPLIAAKNPKIAVSKMMMVLGAKWREFSTNNPFKGSSGASVAAAAAAAVAVVESMVTATEVAPPPPPVEVPIRKAKTKEGKGPNARRKPKGSPRVPDAKKPKPKKVAPLKIKLGGFGSKRKRSSSEDDDLDVESDFDDASINSYSVSDGSTSRSSRSRKKLRTTKKKKKDHQDYCEVCQQGGEIILCDTCPRAYHMVCLDPDMEKAPEGKWSCPHCEKEGIQWEAKEDNSEGEEILEEVGGDLEEEDDHHMEFCRVCKDGGELLCCDTCPSSYHIHCLNPPLPEIPNGEWLCPRCTCPALKGKVQKILIWKWGQPPSPTPVPRPPDADPNTPSPKPLEGRPERQFFVKWQGMSYWHCSWVSELQLELHCQVMFRNYQRKNDMDEPPSGDFGGDEEKSRKRKNKDPKFAEMEERFYRYGIKPEWMMIHRILNHSVDKKGHVHYLIKWRDLPYDQASWESEDVEIQDYDLFKQSYWNHRELMRGEEGRPGKKLKKVKLRKLERPPETPTVDPTVKYERQPEYLDATGGTLHPYQMEGLNWLRFSWAQGTDTILADEMGLGKTVQTAVFLYSLYKEGHSKGPFLVSAPLSTIINWEREFEMWAPDMYVVTYVGDKDSRAIIRENEFSFEDNAIRGGKKASRMKKEASVKFHVLLTSYELITIDMAILGSIDWACLIVDEAHRLKNNQSKFFRVLNGYSLQHKLLLTGTPLQNNLEELFHLLNFLTPERFHNLEGFLEEFADIAKEDQIKKLHDMLGPHMLRRLKADVFKNMPSKTELIVRVELSPMQKKYYKYILTRNFEALNARGGGNQVSLLNVVMDLKKCCNHPYLFPVAAMEAPKMPNGMYDGSALIRASGKLLLLQKMLKNLKEGGHRVLIFSQMTKMLDLLEDFLEHEGYKYERIDGGITGNMRQEAIDRFNAPGAQQFCFLLSTRAGGLGINLATADTVIIYDSDWNPHNDIQAFSRAHRIGQNKKVMIYRFVTRASVEERITQVAKKKMMLTHLVVRPGLGSKTGSMSKQELDDILKFGTEELFKDEATDGGGDNKEGEDSSVIHYDDKAIERLLDRNQDETEDTELQGMNEYLSSFKVAQYVVREEEMGEEEEVEREIIKQEESVDPDYWEKLLRHHYEQQQEDLARNLGKGKRIRKQVNYNDGSQEDRGVCGRPRPPPMGRSTRAVGPAHLPSLPPDWQDDQSDNQSDYSVASEEGDEDFDERSEAPRRPSRKGLRNDKDKPLPPLLARVGGNIEVLGFNARQRKAFLNAIMRYGMPPQDAFTTQWLVRDLRGKSEKEFKAYVSLFMRHLCEPGADGAETFADGVPREGLSRQHVLTRIGVMSLIRKKVQEFEHVNGRWSMPELAEVEENKKMSQPGSPSPKTPTPSTPGDTQPNTPAPVPPAEDGIKIEENSLKEEESIEGEKEVKSTAPETAIECTQAPAPASEDEKVVVEPPEGEEKVEKAEVKERTEEPMETEPKGAADVEKVEEKSAIDLTPIVVEDKEEKKEEEEKKEVMLQNGETPKDLNDEKQKKNIKQRFMFNIADGGFTELHSLWQNEERAATVTKKTYEIWHRRHDYWLLAGIINHGYARWQDIQNDPRYAILNEPFKGEMNRGNFLEIKNKFLARRFKLLEQALVIEEQLRRAAYLNMSEDPSHPSMALNTRFAEVECLAESHQHLSKESMAGNKPANAVLHKVLKQLEELLSDMKADVTRLPATIARIPPVAVRLQMSERNILSRLANRAPEPTPQQVAQQQ

SEQ ID NO: 3976 - protein, 415 aa, Homo sapiens
LCIFGIVDHLGKENDVFQPKTQFLGVYFVSSQEFLANAYVLAVLLFLALLLQRTFLQASYYVAIETGINLRGAIQTKIYNKIMHLSTSNLSMGEMTAGQICNLVAIDTNQLMWFFFLCPNLWAMPVQAQPKLAEEHPDGLHLSTTNEGLDARDKSRRVMLQGRPGKRIIVGVILLYYILGVSALIGAAVIILLAPVQYFVATKLSQAQRSTLEYSNERLKQTNEMLRGIKLLKLYAWENIFRTRVETTRRKEMTSLRAFAIYTSISIFMNTAIPIAAVLITFVGHVSFFKEADFSPSVAFASLSLFHILVTPLFLLSSVVRSTVKALVSVQKLSEFLSSAEIREEQCAPHEPTPQGPASKYQAVPLRVVNRKRPAREDCRGLTGPLQSLVPSADGDADNCCVQIMGGYFTWTPDG

SEQ ID NO: 3977 - protein, 51 aa, Homo sapiens
MEERGDSEPTPGCSGLGPGGVRGFGDGGGAPSWAPEDAWMGTHPKAKAGMK

SEQ ID NO: 3978 - protein, 619 aa, Homo sapiens
MPLAFCGSENHSAAYRVDQGVLNNGCFVDALNVVPHVFLLFITFPILFIGWGSQSSKVHIHHSTWLHFPGHNLRWILTFMLLFVLVCEIAEGILSDGVTESHHLHLYMPAGMAFMAAVTSVVYYHNIETSNFPKLLIALLVYWTLAFITKTIKFVKFLDHAIGFSQLRFCLTGLLVILYGMLLLVEVNVIRVRRYIFFKTPREVKPPEDLQDLGVRFLQPFVNLLSKGTYWWMNAFIKTAHKKPIDLRAIGKLPIAMRALTNYQRLCEAFDAQRKDIQGTQGARAIWQALSHAFGRRLVLSSTFRILADLLGFAGPLCIFGIVDHLGKENDVFQPKTQFLGVYFVSSQEFLANAYVLAVLLFLALLLQRTFLQASYYVAIETGINLRGAIQTKIYNKIMHLSTSNLSMGEMTAGQICNLVAIDTNQLMWFFFLCPNLWAMPVQIIVGVILLYYILGVSALIGAAVIILLAPVQYFVATKLSQAQRSTLEYSNERLKQTNEMLRGIKLLKLYAWENIFRTRVETTRRKEMTSLRAFAIYTSISIFMNTAIPIAAVLITFVGHVSFFKEADFSPSVAFASLSLFHILVTPLFLLSSVVRSTVKALVRGEGCLCASRAACKS

SEQ ID NO: 3979 - protein, 1892 aa, Homo sapiens
MASGLGSPSPCSAGSEEEDMDALLNNSLPPPHPENEEDPEEDLSETETPKLKKKKKPKKPRDPKIPKSKRQKKELGDSSGEGPEFVEEEEEVALRSDSEGSDYTPGKKKKKKLGPKKEKKSKSKRKEEEEEEDDDDDSKEPKSSAQLLEDWGMEDIDHVFSEEDYRTLTNYKAFSQFVRPLIAAKNPKIAVSKMMMVLGAKWREFSTNNPFKGSSGASVAAAAAAAVAVVESMVTATEVAPPPPPVEVPIRKAKTKEGKGPNARRKPKGSPRVPDAKKPKPKKVAPLKIKLGGFGSKRKRSSSEDDDLDVESDFDDASINSYSVSDGSTSRSSRSRKKLRTTKKKKKDHQDYCEVCQQGGEIILCDTCPRAYHMVCLDPDMEKAPEGKWSCPHCEKEGIQWEAKEDNSEGEEILEEVGGDLEEEDDHHMEFCRVCKDGGELLCCDTCPSSYHIHCLNPPLPEIPNGEWLCPRCTCPALKGKVQKILIWKWGQPPSPTPVPRPPDADPNTPSPKPLEGRPERQFFVKWQGMSYWHCSWVSELQLELHCQVMFRNYQRKNDMDEPPSGDFGGDEEKSRKRKNKDPKFAEMEERFYRYGIKPEWMMIHRILNHSVDKKGHVHYLIKWRDLPYDQASWESEDVEIQDYDLFKQSYWNHRELMRGEEGRPGKKLKKVKLRKLERPPETPTVDPTVKYERQPEYLDATGGTLHPYQMEGLNWLRFSWAQGTDTILADEMGLGKTVQTAVFLYSLYKEGHSKGPFLVSAPLSTIINWEREFEMWAPDMYVVTYVGDKDSRAIIRENEFSFEDNAIRGGKKASRMKKEASVKFHVLLTSYELITIDMAILGSIDWACLIVDEAHRLKNNQSKFFRVLNGYSLQHKLLLTGTPLQNNLEELFHLLNFLTPERFHNLEGFLEEFADIAKEDQIKKLHDMLGPHMLRRLKADVFKNMPSKTELIVRVELSPMQKKYYKYILTRNFEALNARGGGNQVSLLNVVMDLKKCCNHPYLFPVAAMEAPKMPNGMYDGSALIRASGKLLLLQKMLKNLKEGGHRVLIFSQMTKMLDLLEDFLEHEGYKYERIDGGITGNMRQEAIDRFNAPGAQQFCFLLSTRAGGLGINLATADTVIIYDSDWNPHNDIQAFSRAHRIGQNKKVMIYRFVTRASVEERITQVAKKKMMLTHLVVRPGLGSKTGSMSKQELDDILKFGTEELFKDEATDGGGDNKEGEDSSVIHYDDKAIERLLDRNQDETEDTELQGMNEYLSSFKVAQYVVREEEMGEEEEVEREIIKQEESVDPDYWEKLLRHHYEQQQEDLARNLGKGKRIRKQVNYNDGSQEDRDWQDDQSDNQSDYSVASEEGDEDFDERSEAPRRPSRKGLRNDKDKPLPPLLARVGGNIEVLGFNARQRKAFLNAIMRYGMPPQDAFTTQWLVRDLRGKSEKEFKAYVSLFMRHLCEPGADGAETFADGVPREGLSRQHVLTRIGVMSLIRKKVQEFEHVNGRWSMPELAEVEENKKMSQPGSPSPKTPTPSTPGDTQPNTPAPVPPAEDGIKIEENSLKEEESIEGEKEVKSTAPETAIECTQAPAPASEDEKVVVEPPEGEEKVEKAEVKERTEEPMETEPKGAADVEKVEEKSAIDLTPIVVEDKEEKKEEEEKKEVMLQNGETPKDLNDEKQKKNIKQRFMFNIADGGFTELHSLWQNEERAATVTKKTYEIWHRRHDYWLLAGIINHGYARWQDIQNDPRYAILNEPFKGEMNRGNFLEIKNKFLARRFKLLEQALVIEEQLRRAAYLNMSEDPSHPSMALNTRFAEVECLAESHQHLSKESMAGNKPANAVLHKVLKQLEELLSDMKADVTRLPATIARIPPVAVRLQMSERNILSRLANRAPEPTPQQVAQQQ

SEQ ID NO: 3980 - protein, 225 aa, Homo sapiens
MWTLGRRAVAGLLASPSPAQAQTLTRVPRPAELAPLCGRRGLRTDIDATCTPRRASSNQRGLNQIWNVKKQSVYLMNLRKSGTLGHPGSLDETTYERLAEETLDSLAEFFEDLADKPYTFEDYDVSFGVNVAPVAVPSLRKSEDHALQTGHVLDYLCFCLLGFQSASEQRSNPDSVVHRMAGVRSTTLLSSPCEWDWHPGCSSRSKYSRKHRAVPVHGPRCQAPG

SEQ ID NO: 3981 - protein, 521 aa, Homo sapiens
FLLSTRAGGLGLNLQSADTVIIFDSDWNPHQDLQAQDRAHRIGQQNEVRVLRLCTVNSVEEKILAAAKYKLNVDQKVIQAGMFDQKSSSHERRAFLQAILEHEEQDESRHCSTGSGSASFAHTAPPPAGVNPDLEEPPLKEEDEVPDDETVNQMIARHEEEFDLFMRMDLDRRREEARNPKRKPRLMEEDELPSWIIKDDAEVERLTCEEEEEKMFGRGSRHRKEVDYSDSLTEKQWLKAIEEGTLEEIEEEVRQKKSSRKRKRDSDAGSSTPTTSTRSRDKDDESKKQKKRGRPPAEKLSPNPPNLTKKMKKIVDAVIKYKDSSGRQLSEVFIQLPSRKELPEYYELIRKPVDFKKIKERIRNHKYRSLNDLEKDVMLLCQNAQTFNLEGSLIYEDSIVLQSVFTSVRQKIEKEDDSEGEESEEEEEGEEEGSESESRSVKVKIKLGRKEKAQDRLKGGRRRPSRGSRAKPVVSDDDSEEEQEELRTCQITASLFPSNCNGSAHHWEMEDLAAQVFVDQD

SEQ ID NO: 3982 - protein, 1166 aa, Homo sapiens
MSLKPQQQQQQQQQQQQQQQQQQQQQQQPPPAAANVRKPGGSGLLASPAAAPSPSSSSVSSSSATAPSSVVAATSGGGRPGLGRGRNSNKGLPQSTISFDGIYANMRMVHILTSVVGSKCEVQVKNGGIYEGVFKTYSPKCDLVLDAAHEKSTESSSGPKREEIMESILFKCSDFVVVQFKDMDSSYAKRDAFTDSAISAKVNGEHKEKDLEPWDAGELTANEELEALENDVSNGWDPNDMFRYNEENYGVVSTYDSSLSSYTVPLERDNSEEFLKREARANQLAEEIESSAQYKARVALENDDRSEEEKYTAVQRNSSEREGHSINTRENKYIPPGQRNREVISWGSGRQNSPRMGQPGSGSMPSRSTSHTSDFNPNSGSDQRVVNGGVPWPSPCPSPSSRPPSRYQSGPNSLPPRAATPTRPPSRPPSRPSRPPSHPSAHGSPAPVSTMPKRMSSEGPPRMSPKAQRHPRNHRVSAGRGSISSGLEFVSHNPPSEAATPPVARTSPSGGTWSSVVSGVPRLSPKTHRPRSPRQNSIGNTPSGPVLASPQAGIIPTEAVAMPIPAASPTPASPASNRAVTPSSEAKDSRLQDQRQNSPAGNKENIKPNETSPSFSKAENKGISPVVSEHRKQIDDLKKFKNDFRLQPSSTSESMDQLLNKNREGEKSRDLIKDKIEPSAKDSFIENSSSNCTSGSSKPNSPSISPSILSNTEHKRGPEVTSQGVQTSSPACKQEKDDKEEKKDAAEQVRKSTLNPNAKEFNPRSFSQPKPSTTPTSPRPQAQPSPSMVGHQQPTPVYTQPVCFAPNMMYPVPVSPGVQPLYPIPMTPMPVNQAKTYRAGKVKYLELELLRYVPNMPQQRQDQHHQSAMMHPASAAGPPIAATPPAYSTQYVAYSPQQFPNQPLVQHVPHYQSQHPHVYSPVIQGNARMMAPPTHAQPGLVSSSATQYGAHEQTHAMYACPKLPYNKETSPSFYFAISTGSLAQQYAHPNATLHPHTPHPQPSATPTGQQQSQHGGSHPAPSPVQHHQHQAAQALHLASPQQQSAIYHAGLAPTPPSMTPASNTQSPQNSFPAAQQTVFTIHPSHVQPAYTNPPHMAHVPQAHVQSGMVPSHPTAHAPMMLMTTQPPGGPQAALAQSALQPIPVSTTAHFPYMTHPSVQAHHQQQL

SEQ ID NO: 3983 - protein, 559 aa, Homo sapiens
MDSPGYNCFVDKDKMDAAIQDLGPKELSCTELQELKQLARQGYWAQSHALRGKVYQRLIRDIPCRTVTPDASVYSDIVGKIVGKHSSSCLPLPEFVDNTQVPSYCLNARGEGAVRKILLCLANQFPDISFCPALPAVVALLLHYSIDEAECFEKACRILACNDPGRRLIDQSFLAFESSCMTFGDLVNKYCQAAHKLMVAVSEDVLQVYADWQRWLFGELPLCYFARVFDVFLVEGYKVLYRVALAILKFFHKVRAGQPLESDSVKQDIRTFVRDIAKTVSPEKLLEKAFAIRLFSRKEIQLLQMANEKALKQKGITVKQKSVSLSKRQFVHLAVHAENFRSEIVSVREMRDIWSWVPERFALCQPLLLFSSLQHGYSLARFYFQCEGHEPTLLLIKTTQKEVCGAYLSTDWSERNKFGGKLGFFGTGECFVFRLQPEVQRYEWVVIKHPELTKPPPLMAAEPTAPLSHSASSDPADRLSPFLAARHFNLPSKTESMFMAGGSDCLIVGGGGGQALYIDGDLNRGRTSHCDTFNNQPLCSENFLIAAVEAWGFQDPDTQ

SEQ ID NO: 3984 - protein, 147 aa, Homo sapiens
MVHLTPEEKTAVNALWGKVNVDAVGGEALGRLLVVYPWTQRFFESFGDLSSPDAVMGNPKVKAHGKKVLGAFSDGLAHLDNLKGTFSQLSELHCDKLHVDPENFRLLGNVLVCVLARNFGKEFTPQMQAAYQKVVAGVANALAHKYH

SEQ ID NO: 3985 - protein, 725 aa, Homo sapiens
AHKKPIDLRAIGKLPIAMRALTNYQRLCEAFDAQRKDIQGTQGARAIWQALSHAFGRRLVLSSTFRILADLLGFAGPLCIFGIVDHLGKENDVFQPKTQFLGVYFVSSQEFLANAYVLAVLLFLALLLQRTFLQASYYVAIETGINLRGAIQTKIYNKIMHLSTSNLSMGEMTAGQICNLVAIDTNQLMWFFFLCPNLWAMPVQIIVGVILLYYILGVSALIGAAVIILLAPVQYFVATKLSQAQRSTLEYSNERLKQTNEMLRGIKLLKLYAWENIFRTRVETTRRKEMTSLRAFAIYTSISIFMNTAIPIAAVLITFVGHVSFFKEADFSPSVAFASLSLFHILVTPLFLLSSVVRSTVKALVSAEIREEQCAPHEPTPQGPASKYQAVPLRVVNRKRPAREDCRGLTGPLQSLVPSADGDADNCCVQIMGGYFTWTPDGIPTLSNITIRIPRGQLTMIVGQVGCGKSSLLLAALGEMQKVSGAVFWSSLPDSEIGEDPSPERETATDLDIRKRGPVAYASQKPWLLNATVEENIIFESPFNKQRYKMVIEACSLQPDIDILPHGDQTQIGERGINLSGGQRQRISVARALYQHANVVFLDDPFSALDIHLSDHLMQAGILELLRDDKRTVVLVTHKLQYLPHADWIIAMKDGTIQREGTLKDFQRSECQLFEHWKTLMNRQDQELEKETVTERKATEPPQGLSRAMSSRDGLLQDEEEEEAC

SEQ ID NO: 3986 - protein, 666 aa, Homo sapiens
MVQGGFPEKIRQRYADLPGELHIIELEKDKNGLGLSLAGNKDRSRMSIFVVGINPEGPAAADGRMRIGDELLEINNQILYGRSHQNASAIIKTAPSKVKLVFIRNEDAVNQMAVTPFPVPSSSPSSIEDQSGTEPISSEEDGSVEVGIKQLPESESFKLAVSQMKQQKYPTKVSFSSQEIPLAPASSYHSTDADFTGYGGFQAPLSVDPATCPIVPGQEMIIEISKGRSGLGLSIVGGKDTPLNAIVIHEVYEEGAAARDGRLWAGDQILEVNGVDLRNSSHEEAITALRQTPQKVRLVVYRDEAHYRDEENLEIFPVDLQKKAGRGLGLSIVGKRNGSGVFISDIVKGGAADLDGRLIQGDQILSVNGEDMRNASQETVATILKCAQGLVQLEIGRLRAGSWTSARTTSQNSQGSQQSAHSSCHPSFAPVITGLQNLVGTKRVSDPSQKNSGTDMEPRTVEINRELSDALGISIAGGRGSPLGDIPVFIAMIQASGVAARTQKLKVGDRIVSINGQPLDGLSHADVVNLLKNAYGRIILQVVADTNISAIAAQLENMSTGYHLGSPTAEHHPEDTETPPPKIITLEKGSEGLGFSIVGGYGSPHGDLPIYVKTVFAKGAAADDGRLKRGDQILAVNGETLEGVTHEQAVAILKHQRGTVTLTVLS

SEQ ID NO: 3987 - protein, 447 aa, Homo sapiens
MSPTISHKDSSRQRRPGNFSHSLDMKSGPLPPGGWDDSHLDSAGREGDREALLGDTGTGDFLKAPQSFRAELSSILLLLFLYVLQGIPLGLAGSIPLILQSKNVSYTDQAFFSFVFWPFSLKLLWAPLVDAVYVKNFGRRKSWLVPTQYILGLFMIYLSTQVDRLLGNTDDRTPDVIALTVAFFLFEFLAATQDIAVDGWALTMLSRENVGYASTCNSVGQTAGYFLGNVLFLALESADFCNKYLRFQPQPRGIVTLSDWFFSSRCCNRTEIGRRGSTQRTFSLIGSSNGSFADNTASDYQQIHCRSPAIKHILQSHALQVTVYSMYVSIMAFNAKVSDPLIGGTYMTLLNTVSNLGGNWPSTVALWLVDPLTVKECVGASNQNCRTPDAVELCKKLGGSCVTALDGYYVESIICVFIGFGWWFFLGPKFKKLQDEGSSSWKCKRNN

SEQ ID NO: 3988 - protein, 1152 aa, Homo sapiens
MREGLGAACEAAGPRLCRLLCRILRPKPDCCPRRASPVTQDDLQYHNLSKQQNESPQPLVETGKKSPESLVKLDATPLSSPRHVRIKNWGSGMTFQDTLHHKAKGILTCRSKSCLGSIMTPKSLTRGPRDKPTPPDELLPQAIEFVNQYYGSFKEAKIEEHLARVEAVTKEIETTGTYQLTGDELIFATKQAWRNAPRCIGRIQWSNLQVFDARSCSTAREMFEHICRHVRYSTNNGNIRSAITVFPQRSDGKHDFRVWNAQLIRYAGYQMPDGSIRGDPANVEFTQLCIDLGWKPKYGRFDVVPLVLQANGRDPELFEIPPDLVLEVAMEHPKYEWFRELELKWYALPAVANMLLEVGGLEFPGCPFNGWYMGTEIGVRDFCDVQRYNILEEVGRRMGLETHKLASLWKDQAVVEINIAVLHSFQKQNVTIMDHHSAAESFMKYMQNEYRSRGGCPADWIWLVPPMSGSITPVFHQEMLNYVLSPFYYYQVEAWKTHVWQDEKRRPKRREIPLKVLVKAVLFACMLMRKTMASRVRVTILFATETGKSEALAWDLGALFSCAFNPKVVCMDKYRLSCLEEERLLLVVTSTFGNGDCPGNGEKLKKSLFMLKELNNKFRYAVFGLGSSMYPRFCAFAHDIDQKLSHLGASQLTPMGEGDELSGQEDAFRSWAVQTFKAACETFDVRGKQHIQIPKLYTSNVTWDPHHYRLVQDSQPLDLSKALSSMHAKNVFTMRLKSRQNLQSPTSSRATILVELSCEDGQGLNYLPGEHLGVCPGNQPALVQGILERVVDGPTPHQTVRLEALDESGSYWVSDKRLPPCSLSQALTYFLDITTPPTQLLLQKLAQVATEEPERQRLEALCQPSEYSKWKFTNSPTFLEVLEEFPSLRVSAGFLLSQLPILKPRFYSISSSRDHTPTEIHLTVAVVTYHTRDGQGPLHHGVCSTWLNSLKPQDPVPCFVRNASGFHLPEDPSHPCILIGPGTGIAPFRSFWQQRLHDSQHKGVRGGRMTLVFGCRRPDEDHIYQEEMLEMAQKGVLHAVHTAYSRLPGKPKVYVQDILRQQLASEVLRVLHKEPGHLYVCGDVRMARDVAHTLKQLVAAKLKLNEEQVEDYFFQLKSQKRYHEDIFGAVFPYEAKKDRVAVQPSSLEMSAL

SEQ ID NO: 3989 - protein, 155 aa, Homo sapiens
MEERGDSEPTPGCSGLGPGGVRGFGDGGGAPSWAPEDAWMGTHPKYLEMMELDIGDATQVYVAFLVYLDLMESKSWHEVNCVGLPELQLICLVGTEIEGEGLQTVVPTPITASLSHNSCTQKKAHMRTQQEGGCLQAKKRGLIRDGMFLHFGLDF

SEQ ID NO: 3990 - protein, 144 aa, Homo sapiens
MGLHSWQCGQLRQPPRALRGQRWRAWSRMEPRSPAAAMPGHRTTPEKSKDRGSNTIGARLNRVEDKVTQLDQRLALITDMLHQLLSLHGGSTPGSGGPPREGGAHITQPCGSGGSVDPELFLPSNTLPTYEQLTVPRRGPDEGS

SEQ ID NO: 3991 - protein, 945 aa, Homo sapiens
LIEPLTNLIHSTSAMSLLYECVNTVIAVLISLSSGMPNHSASIQLCVQKLRILIEDSDQNLKYLGLLAMSKILKTHPKSVQSHKDLILQCLDDKDESIRLRALDLLYGMVSKKNLMEIVKKLMTHVDKAEGTTYRDELLTKIIDICSQSNYQYITNFEWYISILVELTRLEGTRHGHLIAAQMLDVAIRVKAIRKFAVSQMSALLDSAHLLASSTQRNGICEVLYAAAWICGEFSEHLQEPHHTLEAMLRPRVTTLPGHIQAVYVQNVVKLYASILQQKEQAGEAEGAQAVTQLMVDRLPQFVQSADLEVQERASCILQLVKHIQKLQAKDVPVAEEVSALFAGELNPVAPKAQKKVPVPEGLDLDAWINEPLSDSESEDERPRAVFHEEEQRRPKHRPSEADEEELARRREARKQEQANNPFYIKSSPSPQKRYQDTPGVEHIPVVQIDLSVPLKVPGLPMSDQYVKLEEERRHRQKLEKDKRRKKRKEKEKKGKRRHSSLPTESDEDIAPAQQVDIVTEEMPENALPSDEDDKDPNDPYRALDIDLDKPLADSEKLPIQKHRNTETSKSPEKDVPMVEKKSKKPKKKEKKHKEKERDKEKKKEKEKKAEDLDFWLSTTPPPAPAPAPAPVPSTDECEDAKTEAQGEEDDAEGQDQDKKSPKPKKKKHRKEKEERTKGKKKSKKQPPGSEEAAGEPVQNGAPEEEQLPPESSYSLLAENSYVKMTCDIRGSLQEDSQVTVAIVLENRSSSILKGMELSVLDSLNARMARPQGSSVHDGVPVPFQLPPGVSNEAQYVFTIQSIVMAQKLKGTLSFIAKNDEGATHEKLDFRLHFSCSSYLITTPCYSDAFAKLLESGDLSMSSIKVDGIRMSFQNLLAKICFHHHFSVVERVDSCASMYSRSIQGHHVCLLVKKGENSVSVDGKCSDSTLLSNLLEEMKATLAKC

SEQ ID NO: 3992 - protein, 60 aa, Homo sapiens
SGLGPGGVRGFGDGGGAPSWAPEDAWMGTHPKYLEMMELDIGDATQVYVAFLVYLDLMER

SEQ ID NO: 3993 - protein, 1377 aa, Homo sapiens
MASGLGSPSPCSAGSEEEDMDALLNNSLPPPHPENEEDPEEDLSETETPKLKKKKKPKKPRDPKIPKSKRQKKELGDSSGEGPEFVEEEEEVALRSDSEGSDYTPGKKKKKKLGPKKEKKSKSKRKEEEEEEDDDDDSKEPKSSAQLLEDWGMEDIDHVFSEEDYRTLTNYKAFSQFVRPLIAAKNPKIAVSKMMMVLGAKWREFSTNNPFKGSSGASVAAAAAAAVAVVESMVTATEVAPPPPPVEVPIRKAKTKEGKGPNARRKPKGSPRVPDAKKPKPKKVAPLKIKLGGFGSKRKRSSSEDDDLDVESDFDDASINSYSVSDGSTSRSSRSRKKLRTTKKKKKGEEEVTAVDGYETDHQDYCEVCQQGGEIILCDTCPRAYHMVCLDPDMEKAPEGKWSCPHCEKEGIQWEAKEDNSEGEEILEEVGGDLEEEDDHHMEFCRVCKDGGELLCCDTCPSSYHIHCLNPPLPEIPNGEWLCPRCTCPALKGKVQKILIWKWGQPPSPTPVPRPPDADPNTPSPKPLEGRPERQFFVKWQGMSYWHCSWVSELQLELHCQVMFRNYQRKNDMDEPPSGDFGGDEEKSRKRKNKDPKFAEMEERFYRYGIKPEWMMIHRILNHSVDKKGHVHYLIKWRDLPYDQASWESEDVEIQDYDLFKQSYWNHRELMRGEEGRPGKKLKKVKLRKLERPPETPTVDPTVKYERQPEYLDATGGTLHPYQMEGLNWLRFSWAQGTDTILADEMGLGKTVQTAVFLYSLYKEGHSKGPFLVSAPLSTIINWEREFEMWAPDMYVVTYVGDKDSRAIIRENEFSFEDNAIRGGKKASRMKKEASVKFHVLLTSYELITIDMAILGSIDWACLIVDEAHRLKNNQSKFFRVLNGYSLQHKLLLTGTPLQNNLEELFHLLNFLTPERFHNLEGFLEEFADIAKEDQIKKLHDMLGPHMLRRLKADVFKNMPSKTELIVRVELSPMQKKYYKYILTRNFEALNARGGGNQVSLLNVVMDLKKCCNHPYLFPVAAMEAPKMPNGMYDGSALIRASGKLLLLQKMLKNLKEGGHRVLIFSQMTKMLDLLEDFLEHEGYKYERIDGGITGNMRQEAIDRFNAPGAQQFCFLLSTRAGGLGINLATADTVIIYDSDWNPHNDIQAFSRAHRIGQNKKVMIYRFVTRASVEERITQVAKKKMMLTHLVVRPGLGSKTGSMSKQELDDILKFGTEELFKDEATDGGGDNKEGEDSSVIHYDDKAIERLLDRNQDETEDTELQGMNEYLSSFKVAQYVVREEEMGIGRTTSPTTSPITQWLQRKVMKTLMNVQKLPVGPVVRACGMIKISHCLLCWPVLVGILKYLVLMLVSEKPFLMQLCDMVCHLRMLLLPSGL

SEQ ID NO: 3994 - protein, 490 aa, Homo sapiens
MPLAFCGSENHSAAYRVDQGVLNNGCFVDALNVVPHVFLLFITFPILFIGWGSQSSKVHIHHSTWLHFPGHNLRWILTFMLLFVLVCEIAEGILSDGVTESHHLHLYMPAGMAFMAAVTSVVYYHNIETSNFPKLLIALLVYWTLAFITKTIKFVKFLDHAIGFSQLRFCLTGLLVILYGMLLLVEVNVIRVRRYIFFKTPREVKPPEDLQDLGVRFLQPFVNLLSKGTYWWMNAFIKTAHKKPIDLRAIGKLPIAMRALTNYQRLCEAFDAQRKDIQGTQGARAIWQALSHAFGRRLVLSSTFRILADLLGFAGPLCIFGIVDHLGKENDVFQPKTQFLGVYFVSSQEFLANAYVLAVLLFLALLLQRTFLQASYYVAIETGINLRGAIQTKIYNKIMHLSTSNLSMGEMTAGQICNLVAIDTNQLMWFFFLCPNLWAMPVQIIVGVILLYYILGVSALIGAAVIILLAPVQYFVATKLSQAQRSTLFS

SEQ ID NO: 3995 - protein, 837 aa, Homo sapiens
MAAATRRVFHLQPCENSPTMSQNGYFEDSSYYKCDTDDTFEAREEILGDEAFDTANSSIVSGESIRFFVNVNLEMQATNTENEATSGGCVLLHTSRKYLKLKNFKEEIRAHRDLDGFLAQASIVLNETATSLDNVLRTMLRRFARDPDNNEPNCNLDLLMAMLFTDAGAPMRGKVHLLSDTIQGVTATVTGVRYQQSWLCIICTMKALQKRHVCISRLVRPQNWGENSCEVRFVILVLAPPKMKSTKTAMEVARTFATMFSDIAFRQKLLETRTEEEFKEALVHQRQLLTMVSHGPVAPRTKERSTVSLPAHRHPEPPKCKDFVPFGKGIREDIARRFPLYPLDFTDGIIGKNKAVGKYITTTLFLYFACLLPTIAFGSLNDENTDGAIVIRVICDDYDLDFNSFYAWTGLWNSFFLALYAFFNLSLVMSLFKRSTEEIIALFISITFVLDAVKGTVKIFWKYYYGHYLDDYHTKRTSSLVSLSGLGASLNASLHTALNASFLASPTELPSATHSGQATAVLSLLIMLGTLWLGYTLYQFKKSPYLHPCVREILSDCALPIAVLAFSLISSHGFREIEMSKFRYNPSESPFAMAQIQSLSLRAVSGAMGLGFLLSMLFFIEQNLVAALVNAPENRLVKGTAYHWDLLLLAIINTGLSLFGLPWIHAAYPHSPLHVRALALVEERVENGHIYDTIVNVKETRLTSLGASVLVGLSLLLLPVPLQWIPKPVLYGLFLYIALTSLDGNQLVQRVALLLKEQTAYPPTHYIRRVPQRKIHYFTGLQVLQLLLLCAFGMSSLPYMKMIFPLIMIAMIPIRYILLPRIIEAKYLDVMDAEHRP

SEQ ID NO: 3996 - protein, 561 aa, Homo sapiens
MPLAFCGSENHSAAYRVDQGVLNNGCFVDALNVVPHVFLLFITFPILFIGWGSQSSKVHIHHSTWLHFPGHNLRWILTFMLLFVLVCEIAEGILSDGVTESHHLHLYMPAGMAFMAAVTSVVYYHNIETSNFPKLLIALLVYWTLAFITKTIKFVKFLDHAIGFSQLRFCLTGLLVILYGMLLLVEVNVIRVRRYIFFKTPREVKPPEDLQDLGVRFLQPFVNLLSKGTYWWMNAFIKTAHKKPIDLRAIGKLPIAMRALTNYQRLCEAFDAQVRKDIQGTQGARAIWQALSHAFGRRLVLSSTFRILADLLGFAGPLCIFGIVDHLGKENDVFQPKTQFLGVYFVSSQEFLANAYVLAVLLFLALLLQRTFLQASYYVAIETGINLRGAIQTKIYNKIMHLSTSNLSMGEMTAGQICNLVAIDTNQLMWFFFLCPNLWAMPVQIIVGVILLYYILGVSALIGAAVIILLAPVQYFVATKLSQAQRSTLEYSNERLKQTNEMLRGIKLLKLYAWENIFRTRVETTRRKEMTSLRAFAIYTSISSWPHWTALPPSHPGHLHV

SEQ ID NO: 3997 - protein, 132 aa, Homo sapiens
MAAALFVLLGFALLGTHGASGAAGTVFTTVEDLGSKILLTCSLNDSATEVTGHRWLKGGVVLKEDALPGQKTEFKAPTRPSSRSACAATWPPSGPSWASWLRCWCWSPSSSSTRSAGSPRTSWMMTTPALHP

SEQ ID NO: 3998 - protein, 396 aa, Homo sapiens
VITRKVNIQVGDVNDNAPTFHNQPYSVRIPENTPVGTPIFIVNATDPDLGAGGSVLYSFQPPSQFFAIDSARGIVTVIRELDYETTQAYQLTVNATDQDKTRPLSTLANLAIIITDVQDMDPIFINLPYSTNIYEHSPPGTTVRIITAIDQDKGRPRGIGYTIVSGNTNSIFALDYISGVLTLNGLLDRENPLYSHGFILTVKGTELNDDRTPSDATVTTTFNILVIDINDNAPEFNSSEYSVAITELAQVGFALPLFIQVVDKDENLGLNSMFEVYLVGNNSHHFIISPTSVQGKADIRIRVAIPLDYETVDRYDFDLFANESVPDHVGYAKVKITLINENDNRPIFSQPLYNISLYENVTVGTSVLTVLWEKFFCSNSSRFSSAQLVVSSWNQL

SEQ ID NO: 3999 - protein, 125 aa, Homo sapiens
AWMGTHPKYLEMMELDIGDATQVYVAFLVYLDLMESKSWHEVNCVGLPELQLICLVGTEIEGEGLQTVVPTPITASLSHNRRNNPYIFIKDINKKQLSPSCESDPNPLTSSLIQVRGFHYCRSAL

SEQ ID NO: 4000 - protein, 1425 aa, Homo sapiens
MASGLGSPSPCSAGSEEEDMDALLNNSLPPPHPENEEDPEEDLSETETPKLKKKKKPKKPRDPKIPKSKRQKKELGDSSGEGPEFVEEEEEVALRSDSEGSDYTPGKKKKKKLGPKKEKKSKSKRKEEEEEEDDDDDSKEPKSSAQLLEDWGMEDIDHVFSEEDYRTLTNYKAFSQFVRPLIAAKNPKIAVSKMMMVLGAKWREFSTNNPFKGSSGASVAAAAAAAVAVVESMVTATEVAPPPPPVEVPIRKAKTKEGKGPNARRKPKGSPRVPDAKKPKPKKVAPLKIKLGGFGSKRKRSSSEDDDLDVESDFDDASINSYSVSDGSTSRSSRSRKKLRTTKKKKKDHQDYCEVCQQGGEIILCDTCPRAYHMVCLDPDMEKAPEGKWSCPHCEKEGIQWEAKEDNSEGEEILEEVGGDLEEEDDHHMEFCRVCKDGGELLCCDTCPSSYHIHCLNPPLPEIPNGEWLCPRCTCPALKGKVQKILIWKWGQPPSPTPVPRPPDADPNTPSPKPLEGRPERQFFVKWQGMSYWHCSWVSELQLELHCQVMFRNYQRKNDMDEPPSGDFGGDEEKSRKRKNKDPKFAEMEERFYRYGIKPEWMMIHRILNHSVDKKGHVHYLIKWRDLPYDQASWESEDVEIQDYDLFKQSYWNHRELMRGEEGRPGKKLKKVKLRKLERPPETPTVDPTVKYERQPEYLDATGGTLHPYQMEGLNWLRFSWAQGTDTILADEMGLGKTVQTAVFLYSLYKEGHSKGPFLVSAPLSTIINWEREFEMWAPDMYVVTYVGDKDSRAIIRENEFSFEDNAIRGGKKASRMKKEASVKFHVLLTSYELITIDMAILGSIDWACLIVDEAHRLKNNQSKFFRVLNGYSLQHKLLLTGTPLQNNLEELFHLLNFLTPERFHNLEGFLEEFADIAKEDQIKKLHDMLGPHMLRRLKADVFKNMPSKTELIVRVELSPMQKKYYKYILTRNFEALNARGGGNQVSLLNVVMDLKKCCNHPYLFPVAAMEAPKMPNGMYDGSALIRASGKLLLLQKMLKNLKEGGHRVLIFSQMTKMLDLLEDFLEHEGYKYERIDGGITGNMRQEAIDRFNAPGAQQFCFLLSTRAGGLGINLATADTVIIYDSDWNPHNDIQAFSRAHRIGQNKKVMIYRFVTRASVEERITQVAKKKMMLTHLVVRPGLGSKTGSMSKQELDDILKFGTEELFKDEATDGGGDNKEGEDSSVIHYDDKAIERLLDRNQDETEDTELQGMNEYLSSFKVAQYVVREEEMGEEEEVEREIIKQEESVDPDYWEKLLRHHYEQQQEDLARNLGKGKRIRKQVNYNDGSQEDRGIGRTTSPTTSPITQWLQRKVMKTLMNVQKLPVGPVVRACGMIKISHCLLCWPVLVGILKYLVLMLVSEKPFLMQLCDMVCHLRMLLLPSGL

SEQ ID NO: 4001 - protein, 183 aa, Homo sapiens
MEERGDSEPTPGCSGLGPGGVRGFGDGGGAPSWAPEDAWMGTHPKYLEMMELDIGDATQVYVAFLVYLDLMESKSWHEVNCVGLPELQLICLVGTEIEGEGLQTVVPTPITASLSHNRIREILKASRKLQGDPDLPMSFTLAIVESDSTIVYYKLTDGFMLPDPQVSFEVTDSKKYKKRKIMT

SEQ ID NO: 4002 - protein, 1740 aa, Homo sapiens
MFRQFYLWTCLASGIILGSLFEICLGQYDDDCKLARGGPPATIVAIDEESRNGTILVDNMLIKGTAGGPDPTIELSLKDNVDYWVLMDPVKQMLFLNSTGRVLDRDPPMNIHSIVVQVQCINKKVGTIIYHEVRIVVRDRNDNSPTFKHESYYATVNELTPVGTTIFTGFSGDNGATDIDDGPNGQIEYVIQYNPDDPTSNDTFEIPLMLTGNIVLRKRLNYEDKTRYFVIIQANDRAQNLNERRTTTTTLTVDVLDGDDLGPMFLPCVLVPNTRDCRPLTYQAAIPELRTPEELNPIIVTPPIQAIDQDRNIQPPSDRPGILYSILVGTPEDYPRFFHMHPRTAELSLLEPVNRDFHQKFDLVIKAEQDNGHPLPAFAGLHIEILDENNQSPYFTMPSYQGYILESAPVGATISDSLNLTSPLRIVALDKDIEDTKDPELHLFLNDYTSVFTVTQTGITRYLTLLQPVDREEQQTYTFSITAFDGVQESEPVIVNIQVMDANDNTPTFPEISYDVYVYTDMRPGDSVIQLTAVDADEGSNGEITYEILVGAQGDFIINKTTGLITIAPGVEMIVGRTYALTVQAADNAPPAERRNSICTVYIEVLPPNNQSPPRFPQLMYSLEISEAMRVGAVLLNLQATDREGDSITYAIENGDPQRVFNLSETTGILTLGKALDRESTDRYILIITASDGRPDGTSTATVNIVVTDVNDNAPVFDPYLPRNLSVVEEEANAFVGQVKATDPDAGINGQVHYSLGNFNNLFRITSNGSIYTAVKLNREVRDYYELVVVATDGAVHPRHSTLTLAIKVLDIDDNSPVFTNSTYTVLVEENLPAGTTILQIEAKDVDLGANVSYRIRSPEVKHFFALHPFTGELSLLRSLDYEAFPDQEASITFLVEAFDIYGTMPPGIATVTVIVKDMNDYPPVFSKRIYKGMVAPDAVKGTPITTVYAEDADPPGLPASRVRYRVDDVQFPYPASIFEVEEDSGRVITRVNLNEEPTTIFKLVVVAFDDGEPVMSSSATVKILVLHPGEIPRFTQEEYRPPPVSELATKGTMVGVISAAAINQSIVYSIVSGNEEDTFGINNITGVIYVNGPLDYETRTSYVLRVQADSLEVVLANLRVPSKSNTAKVYIEIQDENNHPPVFQKKFYIGGVSEDARMFTSVLRVKATDKDTGNYSVMAYRLIIPPIKEGKEGFVVETYTGLIKTAMLFHNMRRSYFKFQVIATDDYGKGLSGKADVLVSVVNQLDMQVIVSNVPPTLVEKKIEDLTEILDRYVQEQIPGAKVVVESIGARRHGDAFSLEDYTKCDLTVYAIDPQTNRAIDRNELFKFLDGKLLDINKDFQPYYGEGGRILEIRTPEAVTSIKKRGESLGYTEGALLALAFIIILCCIPAILVVLVSYRQFKVRQAECTKTARIQAALPAAKPAVPAPAPVAAPPPPPPPPPGAHLYEELGDSSIWSFCWQLVICMRTCAIWRTLTRRGYGSEQQQLLRPSLLKPEELSMESGIDPGQEYGQDYYSYEHGYEMPQYGSRRRLLPPAGQEEYGEVVGEAEEEYEEEEWARKRMIKLVVDREYETSSTGEDSAPECQRNRLHHPSIHSNINGNIYIAQNGSVVRTRRACLTDNLKVASPVRLGGPFKKLDKLAVTHEENVPLNTLSKGPFSTEKMNARPTLVTFAPCPVGTDNTAVKPLRNRLKSTVEQESMIDSKNIKEALEFHSDHTQSDDEELWMGPWNNLHIPMTKL

SEQ ID NO: 4003 - protein, 570 aa, Homo sapiens
MPLAFCGSENHSAAYRVDQGVLNNGCFVDALNVVPHVFLLFITFPILFIGWGSQSSKVHIHHSTWLHFPGHNLRWILTFMLLFVLVCEIAEGILSDGVTESHHLHLYMPAGMAFMAAVTSVVYYHNIETSNFPKLLIALLVYWTLAFITKTIKFVKFLDHAIGFSQLRFCLTGLLVILYGMLLLVEVNVIRVRRYIFFKTPREVKPPEDLQDLGVRFLQPFVNLLSKGTYWWMNAFIKTAHKKPIDLRAIGKLPIAMRALTNYQRLCEAFDAQRKDIQGTQGARAIWQALSHAFGRRLVLSSTFRILADLLGFAGPLCIFGIVDHLGKENDVFQPKTQFLGVYFVSSQEFLANAYVLAVLLFLALLLQRTFLQASYYVAIETGINLRGAIQTKIYNKIMHLSTSNLSMGEMTAGQICNLVAIDTNQLMWFFFLCPNLWAMPVQIIVGVILLYYILGVSALIGAAVIILLAPVQYFVATKLSQAQRSTLEYSNERLKQTNEMLRGIKLLKLYAWENIFRTRVETTRRKEMTSLRAFAIYTSISIFMNTAIPIAAVLIRAKAKRVPVQCRDP

SEQ ID NO: 4004 - protein, 1215 aa, Homo sapiens
MALKMVKGSIDRMFDKNLQDLVRGIRNHKEDEAKYISQCIDEIKQELKQDNIAVKANAVCKLTYLQMLGYDISWAAFNIIEVMSASKFTFKRIGYLAASQSFHEGTDVIMLTTNQIRKDLSSPSQYDTGVALTGLSCFVTPDLARDLANDIMTLMSHTKPYIRKKAVLIMYKVFLKYPESLRPAFPRLKEKLEDPDPGVQSAAVNVICELARRNPKNYLSLAPLFFKLMTSSTNNWVLIKIIKLFGALTPLEPRLGKKLIEPLTNLIHSTSAMSLLYECVNTVIAVLISLSSGMPNHSASIQLCVQKLRILIEDSDQNLKYLGLLAMSKILKTHPKSVQSHKDLILQCLDDKDESIRLRALDLLYGMVSKKNLMEIVKKLMTHVDKAEGTTYRDELLTKIIDICSQSNYQYITNFEWYISILVELTRLEGTRHGHLIAAQMLDVAIRVKAIRKFAVSQMSALLDSAHLLASSTQRNGICEVLYAAAWICGEFSEHLQEPHHTLEAMLRPRVTTLPGHIQAVYVQNVVKLYASILQQKEQAGEAEGAQAVTQLMVDRLPQFVQSADLEVQERASCILQLVKHIQKLQAKDVPVAEEVSALFAGELNPVAPKAQKKVPVPEGLDLDAWINEPLSDSESEDERPRAVFHEEEQRRPKHRPSEADEEELARRREARKQEQANNPFYIKSSPSPQKRYQDTPGVEHIPVVQIDLSVPLKVPGLPMSDQYVKLEEERRHRQKLEKDKRRKKRKEKEKKGKRRHSSLPTESDEDIAPAQQVDIVTEEMPENALPSDEDDKDPNDPYRALDIDLDKPLADSEKLPIQKHRNTETSKSPEKDVPMVEKKSKKPKKKEKKHKEKERDKEKKKEKEKKAEDLDFWLSTTPPPAPAPAPAPVPSTGELSVNTVTTPKDECEDAKTEAQGEEDDAEGQDQDKKSPKPKKKKHRKEKEERTKGKKKSKKQPPGSEEAAGEPVQNGAPEEEQLPPESSYSLLAENSYVKMTCDIRGSLQEDSQVTVAIVLENRSSSILKGMELSVLDSLNARMARPQGSSVHDGVPVPFQLPPGVSNEAQYVFTIQSIVMAQKLKGTLSFIAKNDEGATHEKLDFRLHFSCSSYLITTPCYSDAFAKLLESGDLSMSSIKVDGIRMSFQNLLAKICFHHHFSVVERVDSCASMYSRSIQGHHVCLLVKKGENSVSVDGKCSDSTLLSNLLEEMKATLAKC

SEQ ID NO: 4005 - protein, 130 aa, Homo sapiens
MEERGDSEPTPGCSGLGPGGVRGFGDGGGAPSWAPEDAWMGTHPKYLEMMELDIGDATQVYVAFLVYLDLMESKSWHEVNCVGLPELQLICLVGTEIEGEGLQTVVPTPITASLSHNRSGPGREDLLHCC

SEQ ID NO: 4006 - protein, 445 aa, Homo sapiens
MPLAFCGSENHSAAYRVDQGVLNNGCFVDALNVVPHVFLLFITFPILFIGWGSQSSKVHIHHSTWLHFPGHNLRWILTFMLLFVLVCEIAEGILSDGVTESHHLHLYMPAGMAFMAAVTSVVYYHNIETSNFPKLLIALLVYWTLAFITKTIKFVKFLDHAIGFSQLRFCLTGLLVILYGMLLLVEVNVIRVRRYIFFKTPREVKPPEDLQDLGVRFLQPFVNLLSKGTYWWMNAFIKTAHKKPIDLRAIGKLPIAMRALTNYQRLCEAFDAQRKDIQGTQGARAIWQALSHAFGRRLVLSSTFRILADLLGFAGPLCIFGIVDHLGKENDVFQPKTQFLGVYFVSSQEFLANAYVLAVLLFLALLLQRTFLQASYYVAIETGINLRGAIQTKIYNKIMHLSTSNLSMGEMTAGQICNLVAIDTNQLMWFFFLCPNLWAMPVQFS

SEQ ID NO: 4007 - protein, 1498 aa, Homo sapiens
MPLAFCGSENHSAAYRVDQGVLNNGCFVDALNVVPHVFLLFITFPILFIGWGSQSSKVHIHHSTWLHFPGHNLRWILTFMLLFVLVCEIAEGILSDGVTESHHLHLYMPAGMAFMAAVTSVVYYHNIETSNFPKLLIALLVYWTLAFITKTIKFVKFLDHAIGFSQLRFCLTGLLVILYGMLLLVEVNVIRVRRYIFFKTPREVKPPEDLQDLGVRFLQPFVNLLSKGTYWWMNAFIKTAHKKPIDLRAIGKLPIAMRALTNYQRLCEAFDAQVRKDIQGTQGARAIWQALSHAFGRRLVLSSTFRILADLLGFAGPLCIFGIVDHLGKENDVFQPKTQFLGVYFVSSQEFLANAYVLAVLLFLALLLQRTFLQASYYVAIETGINLRGAIQTKIYNKIMHLSTSNLSMGEMTAGQICNLVAIDTNQLMWFFFLCPNLWAMPVQIIVGVILLYYILGVSALIGAAVIILLAPVQYFVATKLSQAQRSTLEYSNERLKQTNEMLRGIKLLKLYAWENIFRTRVETTRRKEMTSLRAFAIYTSISIFMNTAIPIAAVLIPLRVVNRKRPAREDCRGLTGPLQSLVPSADGDADNCCVQIMGGYFTWTPDGIPTLSNITIRIPRGQLTMIVGQVGCGKSSLLLAALGEMQKVSGAVFWSSSLPDSEIGEDPSPERETATDLDIRKRGPVAYASQKPWLLNATVEENIIFESPFNKQRYKMVIEACSLQPDIDILPHGDQTQIGERGINLSGGQRQRISVARALYQHANVVFLDDPFSALDIHLSDHLMQAGILELLRDDKRTVVLVTHKLQYLPHADWIIAMKDGTIQREGTLKDFQRSECQLFEHWKTLMNRQDQELEKETVTERKATEPPQGLSRAMSSRDGLLQDEEEEEEEAAESEEDDNLSSMLHQRAEIPWRACAKYLSSAGILLLSLLVFSQLLKHMVLVAIDYWLAKWTDSALTLTPAARNCSLSQECTLDQTVYAMVFTVLCSLGIVLCLVTSVTVEWTGLKVAKRLHRSLLNRIILAPMRFFETTPLGSILNRFSSDCNTIDQHIPSTLECLSRSTLLCVSALAVISYVTPVFLVALLPLAIVCYFIQKYFRVASRDLQQLDDTTQLPLLSHFAETVEGLTTIRAFRYEARFQQKLLEYTDSNNIASLFLTAANRWLEVRMEYIGACVVLIAAVTSISNSLHRELSAGLVGLGLTYALMVSNYLNWMVRNLADMELQLGAVKRIHGLLKTEAESYEGLLAPSLIPKNWPDQGKIQIQNLSVRYDSSLKPVLKHVNALIAPGQKIGICGRTGSGKSSFSLAFFRMVDTFEGHIIIDGIDIAKLPLHTLRSRLSIILQDPVLFSGTIRFNLDPERKCSDSTLWEALEIAQLKLVVKALPGGLDAIITEGGENFSQGQRQLFCLARAFVRKTSIFIMDEATASIDMATENILQKVVMTAFADRTVVTIAHRVHTILSADLVIVLKRGAILEFDKPEKLLSRKDSVFASFVRADK

SEQ ID NO: 4008 - protein, 187 aa, Homo sapiens
TPGCSGLGPGGVRGFGDGGGAPSWAPEDAWMGTHPKYLEMMELDIGDATQVYVAFLVYLDLMESKSWHEVNCVGLPELQLICLVGTEIEGEGLQTVVPTPITASLSHNRRNNPYIFIKDINKKQLSPSCESDPNPLTSSLIQLYTEESPYEDTARRWLSSSQEERPHQRWNVPALRSGFLVSRTVRK

SEQ ID NO: 4009 - protein, 1392 aa, Homo sapiens
MARLSFWSQGVELARSTRCFSPEDISGKAPVLGTGMAVDMGMSFMGLPLAGQKHCPKSGQMEAMVMTCSLCHQDLPGMGSHLLSCQHLLRKDCFQGLIQELGQIAKAHETVADELISCPGCERVYLTRDVTEHFFLHCVPTEQPKMARNCSECKEKRAAHILCTYCNRWLCSSCTEEHRHSPVPGGPFFPRAQKGSPGVNGGPGDFTLYCPLHTQEVLKLFCETCDMLTCHSCLVVEHKEHRCRHVEEVLQNQRMLLEGVTTQVAHKKSSLQTSAKQIEDRIFEVKHQHRKVENQIKMAKMVLMNELNKQANGLIEELEGITNERKRKLEQQLQSIMVLNRQFEHVQNFINWAVCSKTSVPFLFSKELIVFQMQRLLETSCNTDPGSPWSIRFTWEPNFWTKQLASLGCITTEGGQMSRADAPAYGGLQGSSPFYQSHQSPVAQQEALSHPSHKFQSPAVCSSSVCCSHCSPVSPSLKGQVPPPSIHPAHSFRQPPEMVPQQLGSLQCSALLPREKELACSPHPPKLLQPWLETQPPVEQESTSQRLGQQLTSQPVCIVPPQDVQQGAHAQPTLQTPSIQVQFGHHQKLKLSHFQQQPQQQLPPPPPPLPHPPPPLPPPPQQPHPPLPPSQHLASSQHESPPGPACSQNMDIMHHKFELEEMQKDLELLLQAQQPSLQLSQTKSPQHLQQTIVGQINYIVRQPAPVQSQSQEETLQATDEPPASQGSKPALPLDKNTAAALPQASGEETPLSVPPVDSTIQHSSPNVVRKHSTSLSIMGFSNTLEMELSSTRLERPLEPQIQSVSNLTAGAPQAVPSLLSAPPKMVSSLTSVQNQAMPSLTTSHLQTVPSLVHSTFQSMPNLISDSPQAMASLASDHPQAGPSLMSGHTQAVPSLATCPLQSIPPVSDMQPETGSSSSSGRTSGSLCPRDGADPSLENALCKMESEDSTRFTDLLGQGPIVPGLDAPKDLAIPSELEEPINLSVKKPPLAPVVSTSTALQQYQNPKECENFEQGALELDAKENQSIRAFNSEHKIPYVRLERLKICAASSGEMPVFKLKPQKNDQDGSFLLIIECGTESSSMSIKVSQDRLSEATQAPGLEGRKVTVTSLAGQRPPEVEGTSPEEHRLIPRTPGAKKGPPAPIENEDFCAVCLNGGELLCCDRCPKVFHLSCHVPALLSFPGGEWVCTLCRSLTQPEMEYDCENACYNQPGMRASPGLSMYDQKKCEKLVLSLCCNNLSLPFHEPVSPLARHYYQIIKRPMDLSIIRRKLQKKDPAHYTTPEEVVSDVRLMFWNCAKFNYPDSEVAEAGRCLEVFFEGWLKEIYPEKRFAQPRQEDSDSEEVSSESGCSTPQGFPWPPYMQEGIQPKRRRRHMENERAKRMSFRLANSISQV

SEQ ID NO: 4010 - protein, 469 aa, Homo sapiens
ITFPILFIGWGSQSSKVHIHHSTWLHFPGHNLRWILTFMLLFVLVCEIAEGILSDGVTESHHLHLYMPAGMAFMAAVTSVVYYHNIETSNFPKLLIALLVYWTLAFITKTIKFVKFLDHAIGFSQLRFCLTGLLVILYGMLLLVEVNVIRVRRYIFFKTPREVKPPEDLQDLGVRFLQPFVNLLSKGTYWWMNAFIKTAHKKPIDLRAIGKLPIAMRALTNYQRLCEAFDAQRKDIQGTQGARAIWQALSHAFGRRLVLSSTFRILADLLGFAGPLCIFGIVDHLGKENDVFQPKTQFLGVYFVSSQEFLANAYVLAVLLFLALLLQRTFLQASYYVAIETGINLRGAIQTKIYNKIMHLSTSNLSMGEMTAGQICNLVAIDTNQLMWFFFLCPNLWAMPVQIIVGVILLYYILGVSALIGAAVIILLAPVQYFVATKLSQAQRSTLVSAQSFHEHGHPHCSCPHTCKS

SEQ ID NO: 4011 - protein, 980 aa, Homo sapiens
MPLAFCGSENHSAAYRVDQGVLNNGCFVDALNVVPHVFLLFITFPILFIGWGSQSSKVHIHHSTWLHFPGHNLRWILTFMLLFVLVCEIAEGILSDGVTESHHLHLYMPAGMAFMAAVTSVVYYHNIETSNFPKLLIALLVYWTLAFITKTIKFVKFLDHAIGFSQLRFCLTGLLVILYGMLLLVEVNVIRVRRYIFFKTPREVKPPEDLQDLGVRFLQPFVNLLSKGTYWWMNAFIKTAHKKPIDLRAIGKLPIAMRALTNYQRLCEAFDAQRKDIQGTQGARAIWQALSHAFGRRLVLSSTFRILADLLGFAGPLCIFGIVDHLGKENDVFQPKTQFLGVYFVSSQEFLANAYVLAVLLFLALLLQRTFLQASYYVAIETGINLRGAIQTKIYNKIMHLSTSNLSMGEMTAGQICNLVAIDTNQLMWFFFLCPNLWAMPVQIIVGVILLYYILGVSALIGAAVIILLAPVQYFVATKLSQAQRSTLEYSNERLKQTNEMLRGIKLLKLYAWENIFRTRVETTRRKEMTSLRAFAIYTSISIFMNTAIPIAAVLITFVGHVSFFKEADFSPSVAFASLSLFHILVTPLFLLSSVVRSTVKALVSVQKLSEFLSSAEIREEQCAPHEPTPQGPASKYQAVPLRVVNRKRPAREDCRGLTGPLQSLVPSADGDADNCCVQIMGGYFTWTPDGIPTLSNITIRIPRGQLTMIVGQVGCGKSSLLLAALGEMQKVSGAVFWSSSLPDSEIGEDPSPERETATDLDIRKRGPVAYASQKPWLLNATVEENIIFESPFNKQRYKMVIEACSLQPDIDILPHGDQTQIGERGINLSGGQRQRISVARALYQHANVVFLDDPFSALDIHLSDHLMQAGILELLRDDKRTVVLVTHKLQYLPHADWIIAMKDGTIQREGTLKDFQRSECQLFEHWKTLMNRQDQELEKETVTERKATEPPQGLSRAMSSRDGLLQDEEEEEVSGDKMP

SEQ ID NO: 4012 - protein, 1955 aa, Homo sapiens
MEFPIGSLETNNFRRFTPESLVEIEKQIAAKQGTKKAREKHREQKDQEEKPRPQLDLKACNQLPKFYGELPAELIGEPLEDLDPFYSTHRTFMVLNKGRTISRFSATRALWLFSPFNLIRRTAIKVSVHSWFSLFITVTILVNCVCMTRTDLPEKIEYVFTVIYTFEALIKILARGFCLNEFTYLRDPWNWLDFSVITLAYVGTAIDLRGISGLRTFRVLRALKTVSVIPGLKVIVGALIHSVKKLADVTILTIFCLSVFALVGLQLFKGNLKNKCVKNDMAVNETTNYSSHRKPDIYINKRGTSDPLLCGNGSDSGHCPDGYICLKTSDNPDFNYTSFDSFAWAFLSLFRLMTQDSWERLYQQTLRTSGKIYMIFFVLVIFLGSFYLVNLILAVVTMAYEEQNQATTDEIEAKEKKFQEALEMLRKEQEVLAALGIDTTSLHSHNGSPLTSKNASERRHRIKPRVSEGSTEDNKSPRSDPYNQRRMSFLGLASGKRRASHGSVFHFRSPGRDISLPEGVTDDGVFPGDHESHRGSLLLGGGAGQQGPLPRSPLPQPSNPDSRHGEDEHQPPPTSELAPGAVDVSAFDAGQKKTFLSAEYLDEPFRAQRAMSVVSIITSVLEELEESEQKCPPCLTSLSQKYLIWDCCPMWVKLKTILFGLVTDPFAELTITLCIVVNTIFMAMEHHGMSPTFEAMLQIGNIVFTIFFTAEMVFKIIAFDPYYYFQKKWNIFDCIIVTVSLLELGVAKKGSLSVLRSFRLLRVFKLAKSWPTLNTLIKIIGNSVGALGNLTIILAIIVFVFALVGKQLLGENYRNNRKNISAPHEDWPRWHMHDFFHSFLIVFRILCGEWIENMWACMEVGQKSICLILFLTVMVLGNLVVLNLFIALLLNSFSADNLTAPEDDGEVNNLQVALARIQVFGHRTKQALCSFFSRSCPFPQPKAEPELVVKLPLSSSKAENHIAANTARGSSGGLQAPRGPRDEHSDFIANPTVWVSVPIAEGESDLDDLEDDGGEDAQSFQQEVIPKGQEQLQQVERCGDHLTPRSPGTGTSSEDLAPSLGETWKDESVPQVPAEGVDDTSSSEGSTVDCLDPEEILRKIPELADDLEEPDDCFTEGCIRHCPCCKLDTTKSPWDVGWQVRKTCYRIVEHSWFESFIIFMILLSSGSLAFEDYYLDQKPTVKALLEYTDRVFTFIFVFEMLLKWVAYGFKKYFTNAWCWLDFLIVNISLISLTAKILEYSEVAPIKALRTLRALRPLRALSRFEGMRVVVDALVGAIPSIMNVLLVCLIFWLIFSIMGVNLFAGKFWRCINYTDGEFSLVPLSIVNNKSDCKIQNSTGSFFWVNVKVNFDNVAMGYLALLQVATFKGWMDIMYAAVDSREVNMQPKWEDNVYMYLYFVIFIIFGGFFTLNLFVGVIIDNFNQQKKKLGGQDIFMTEEQKKYYNAMKKLGSKKPQKPIPRPLNKFQGFVFDIVTRQAFDITIMVLICLNMITMMVETDDQSEEKTKILGKINQFFVAVFTGECVMKMFALRQYYFTNGWNVFDFIVVVLSIASLIFSAILKSLQSYFSPTLFRVIRLARIGRILRLIRAAKGIRTLLFALMMSLPALFNIGLLLFLVMFIYSIFGMSSFPHVRWEAGIDDMFNFQTFANSMLCLFQITTSAGWDGLLSPILNTGPPYCDPNLPNSNGTRGDCGSPAVGIIFFTTYIIISFLIMVNMYIAVILENFNVATEESTEPLSEDDFDMFYETWEKFDPEATQFITFSALSDFADTLSGPLRIPKPNRNILIQMDLPLVPGDKIHCLDILFAFTKNVLGESGELDSLKANMEEKFMATNLSKSSYEPIATTLRWKQEDISATVIQKAYRSYVLHRSMALSNTPCVPRAEEEAASLPDEGFVAFTANENCVLPDKSETASATSFPPSYESVTRGLSDRVNMRTSSSIQNEDEATSMELIAPGP

SEQ ID NO: 4013 - protein, 141 aa, Homo sapiens
MEERGDSEPTPGCSGLGPGGVRGFGDGGGAPSWAPEDAWMGTHPKYLEMMELDIGDATQVYVAFLVYLDLMESKSWHEVNCVGLPELQLICLVGTEIEGEGLQTVVPTPITASLSHNRRIYLNLSFPWLRRMKRQETWGTP

SEQ ID NO: 4014 - protein, 310 aa, Homo sapiens
GWKCFVYHFAVFLIVLVCLIFSVLSTIEQYAALATGTLFWMVTVTTIGYGDKVPQTWVGKTIASCFSVFAISFFALPATAWRCYAAENPDSSTWKIYIRKAPRSHTLLSPSPKPKKSVVVKKKKFKLDKDNGVTPGEKMLTVPHITCDPPEERRLDHFSVDGYDSSVRKSPTLLEVSMPHFMRTNSFAEDLDLEGETLLTPITHISQLREHHRATIKVIRRMQYFVAKKKFQQARKPYDVRDVIEQYSQGHLNLMVRIKELQRRLDQSIGKPSLFISVSEKSKDRGSNTIGARLNRVEDKSTKKRPSPGS

SEQ ID NO: 4015 - protein, 1645 aa, Homo sapiens
MASGLGSPSPCSAGSEEEDMDALLNNSLPPPHPENEEDPEEDLSETETPKLKKKKKPKKPRDPKIPKSKRQKKELGDSSGEGPEFVEEEEEVALRSDSEGSDYTPGKKKKKKLGPKKEKKSKSKRKEEEEEEDDDDDSKEPKSSAQLLEDWGMEDIDHVFSEEDYRTLTNYKAFSQFVRPLIAAKNPKIAVSKMMMVLGAKWREFSTNNPFKGSSGASVAAAAAAAVAVVESMVTATEVAPPPPPVEVPIRKAKTKEGKGPNARRKPKGSPRVPDAKKPKPKKVAPLKIKLGGFGSKRKRSSSEDDDLDVESDFDDASINSYSVSDGSTSRSSRSRKKLRTTKKKKKGEEEVTAVDGYETDHQDYCEVCQQGGEIILCDTCPRAYHMVCLDPDMEKAPEGKWSCPHCEKEGIQWEAKEDNSEGEEILEEVGGDLEEEDDHHMEFCRVCKDGGELLCCDTCPSSYHIHCLNPPLPEIPNGEWLCPRCTCPALKGKVQKILIWKWGQPPSPTPVPRPPDADPNTPSPKPLEGRPERQFFVKWQGMSYWHCSWVSELQLELHCQVMFRNYQRKNDMDEPPSGDFGGDEEKSRKRKNKDPKFAEMEERFYRYGIKPEWMMIHRILNHSVDKKGHVHYLIKWRDLPYDQASWESEDVEIQDYDLFKQSYWNHRELMRGEEGRPGKKLKKVKLRKLERPPETPTVDPTVKYERQPEYLDATGGTLHPYQMEGLNWLRFSWAQGTDTILADEMGLGKTVQTAVFLYSLYKEGHSKGPFLVSAPLSTIINWEREFEMWAPDMYVVTYVGDKDSRAIIRENEFSFEDNAIRGGKKASRMKKEASVKFHVLLTSYELITIDMAILGSIDWACLIVDEAHRLKNNQSKFFRVLNGYSLQHKLLLTGTPLQNNLEELFHLLNFLTPERFHNLEGFLEEFADIAKEDQIKKLHDMLGPHMLRRLKADVFKNMPSKTELIVRVELSPMQKKYYKYILTRNFEALNARGGGNQVSLLNVVMDLKKCCNHPYLFPVAAMEAPKMPNGMYDGSALIRASGKLLLLQKMLKNLKEGGHRVLIFSQMTKMLDLLEDFLEHEGYKYERIDGGITGNMRQEAIDRFNAPGAQQFCFLLSTRAGGLGINLATADTVIIYDSDWNPHNDIQAFSRAHRIGQNKKVMIYRFVTRASVEERITQVAKKKMMLTHLVVRPGLGSKTGSMSKQELDDILKFGTEELFKDEATDGGGDNKEGEDSSVIHYDDKAIERLLDRNQDETEDTELQGMNEYLSSFKVAQYVVREEEMGEEEEVEREIIKQEESVDPDYWEKLLRHHYEQQQEDLARNLGKGKRIRKQVNYNDGSQEDRDWQDDQSDNQSDYSVASEEGDEDFDERSEAPRRPSRKGLRNDKDKPLPPLLARVGGNIEVLGFNARQRKAFLNAIMRYGMPPQDAFTTQWLVRDLRGKSEKEFKAYVSLFMRHLCEPGADGAETFADGVPREGLSRQHVLTRIGVMSLIRKKVQEFEHVNGRWSMPELAEVEENKKMSQPGSPSPKTPTPSTPGDTQPNTPAPVPPAEDGIKIEENSLKEEESIEGEKEVKSTAPETAIECTQAPAPASEDEKVVVEPPEGEEKVEKAEVKERTEEPMETEPKGWSAMVRSRLTATSAS

SEQ ID NO: 4016 - protein, 1089 aa, Homo sapiens
PVSASASVSASVPASTSAAAITSSSAPASAPAPTPILASVSTPASVTILASASIPILASALASTSAPTPAPAASSPAAPVITAPTIPASAPTASVPLAPASASAPAPAPTPVSAPNPAPPAPAQTQAQTHKPVQNPLQTTSQSSKQPPPSIRLPSAQTPNGTDYVASGKSIQTPQSHGTLTAELWDNKVAPPAVLNDISKKLGPISPPQPPSVSAWNKPLTSFGSAPSSEGAKNGQESGLEIGTDTIQFGAPASNGNENEVVPVLSEKSADKIPEPKEQRQKQPRAGPIKAQKLPDLSPVENKEHKPGPIGKERSLKNRKVKDAQQVEPEGQEKPSPATVRSTDPVTTKETKAVSEMSTEIGTMISVSSAEYGTNAKESVTDYTTPSSSLPNTVATNNTKMEDTLVNNVPLPNTLPLPKRETIQQSSSLTSVPPTTFSLTFKMESARKAWENSPNVREKGSPVTSTAPPIATGVSSSASGPSTANYNSFSSASMPQIPVASVTPTASLSGAGTYTTSSLSTKSTTTSDPPNICKVKPQQLQTSSLPSASHFSQLSCMPSLIAQQQQNPQVYVSQSAAAQIPAFYMDTSHLFNTQHARLAPPSLAQQQGFQPGLSQPTSVQQIPIPIYAPLQGQHQAQLSLGAGPAVSQAQELFSSSLQPYRSQPAFMQSSLSQPSVVLSGTAIHNFPTVQHQELAKAQSGLAFQQTSNTQPIPILYEHQLGQASGLGGSQLIDTHLLQARANLTQASNLYSGQVQQPGQTNFYNTAQSPSALQQVTVPLPASQLSLPNFGSTGQPLIALPQTLQPPLQHTTPQAQAQSLSRPAQVSQPFRGLIPAGTQHSMIATTGKMSEMELKAFGSGIDIKPGTPPIAGRSTTPTSSPFRATSTSPNSQSSKMNSIVYQKQFQSAPATVRMTQPFPTQFAPQILSQPNLVPPLVRAPHTNTFPAPVQRPPMALASQMPPPLTTGLMSHARLPHVARGPCGSLSGVRGNQAQAALKAEQDMKAKQRAEVLQSTQRFFSEQQQSKQIGGGKAQKVDSDSSKPPETLTDPPGVCQEKVEEKPPPAPSIATKPVRTGPIKPQAIKTEETKS

SEQ ID NO: 4017 - protein, 909 aa, Homo sapiens
TSQSSKQPPPSIRLPSAQTPNGTDYVASGKSIQTPQSHGTLTAELWDNKVAPPAVLNDISKKCPISPPQPPSVSAWNKPLTSFGSAPSSEGAKNGQESGLEIGTDTIQFGAPASNGNENEVVPVLSEKSADKIPEPKEQRQKQPRAGPIKAQKLPDLSPVENKEHKPGPIGKERSLKNRKVKDAQQVEPEGQEKPSPATVRSTDPVTTKETKAVSEMSTEIGTMISVSSAEYGTNAKESVTDYTTPSSSLPNTVATNNTKMEDTLVNNVPLPNTLPLPKRETIQQSSSLTSVPPTTFSLTFKMESARKAWENSPNVREKGSPVTSTAPPIATGVSSSASGPSTANYNSFSSASMPQIPVASVTPTASLSGAGTYTTSSLSTKSTTTSDPPNICKVKPQQLQTSSLPSASHFSQLSCMPSLIAQQQQNPQVYVSQSAAAQIPAFYMDTSHLFNTQHARLAPPSLAQQQGFQPGLSQPTSVQQIPIPIYAPLQGQHQAQLSLGAGPAVSQAQELFSSSLQPYRSQPAFMQSSLSQPSVVLSGTAIHNFPTVQHQELAKAQSGLAFQQTSNTQPIPILYEHQLGQASGLGGSQLIDTHLLQARANLTQASNLYSGQVQQPGQTNFYNTAQSPSALQQVNYGMVTVPLPASQLSLPNFGSTGQPLIALPQTLQPPLQHTTPQAQAQSLSRPAQVSQPFRGLIPAGTQHSMIATTGKMSEMELKAFGSGIDIKPGTPPIAGRSTTPTSSPFRATSTSPNSQSSKMNSIVYQKQFQSAPATVRMTQPFPTQFAPQILSQPNLVPPLVRAPHTNTFPAPVQRPPMALASQMPPPLTTGLMSHARLPHVARGPCGSLSGVRGNQAQAALKAEQDMKKRAVGRGLSHKTFGPRCWQSREQRFFSPRNGSSLNSNRANR

SEQ ID NO: 4018 - protein, 1013 aa, Homo sapiens
MCSQEAFQAQRSQLVELLVSGSLEGFESVLDWLLSWEVLSWEDYEGFHLLGQPLSHLARRLLDTVWNKGTWACQKLIAAAQEAQADSQSPKLHGCWDPHSLHPARDLQSHRPAIVRRLHSHVENMLDLAWERGFVSQYECDEIRLPIFTPSQRARRLLDLATVKANGLAAFLLQHVQELPVPLALPLEAATCKKYMAKLRTTVSAQSRFLSTYDGAETLCLEDIYTENVLEVWADVGMAGPPQKSPATLGLEELFSTPGHLNDDADTVLVVGEAGSGKSTLLQRLHLLWAAGQDFQEFLFVFPFSCRQLQCMAKPLSVRTLLFEHCCWPDVGQEDIFQLLLDHPDRVLLTFDGFDEFKFRFTDRERHCSPTDPTSVQTLLFNLLQGNLLKNARKVVTSRPAAVSAFLRKYIRTEFNLKGFSEQGIELYLRKRHHEPGVADRLIRLLQETSALHGLCHLPVFSWMVSKCHQELLLQEGGSPKTTTDMYLLILQHFLLHATPPDSASQGLGPSLLRGRLPTLLHLGRLALWGLGMCCYVFSAQQLQAAQVSPDDISLGFLVRAKGVVPGSTAPLEFLHITFQCFFAAFYLALSADVPPALLRHLFNCGRPGNSPMARLLPTMCIQASEGKDSSVAALLQKAEPHNLQITAAFLAGLLSREHWGLLAECQTSEKALLRRQACARWCLARSLRKHFHSIPPAAPGEAKSVHAMPGFIWLIRSLYEMQEERLARKAARGLNVGHLKLTFCSVGPTECAALAFVLQHLRRPVALQLDYNSVGDIGVEQLLPCLGVCKALYLRDNNISDRGICKLIECALHCEQLQKLALFNNKLTDGCAHSMAKLLACRQNFLALRLGNNYITAAGAQVLAEGLRGNTSLQFLGFWGNRVGDEGAQALAEALGDHQSLRWLSLVGNNIGSVGAQALALMLAKNVMLEELCLEENHLQDEGVCSLAEGLKKNSSLKILKLSNNCITYLGAEALLQALERNDTILEVWLRGNTFSLEEVDKLGCRDTRLLL

SEQ ID NO: 4019 - protein, 2308 aa, Homo sapiens
MNIVRKLNLMIPWSIFLLHVLLFSLQEYICASSILMGTSKNGFNENRQKRALLAAQFEATSPRYFFHDAINWGESKIKGSCPYECLNGAFCSKTGTCDCQIFQALGTRCQIIPNMGNGRDGICKTWGQYHFETFDGIYYYFPGNCSYIFAKDCGDLEPRYTVWVHNSPKCLGSVYSCYRSISLFFSNQEEIRIYGHEIKKNGISLTLPQTIGQIFIEKLADYILVKTTFGFSLAWDGISGIYLKLSEDHKGKSCGLCGNYNDIQSDDFIILQEDYTEDIAMFANSWSVQTPDDTKCVLTPSDFPNPCSSGMPAFEAIFFKCQILLQFPFLSCHEYIDPYLYIASCVNDLCKTDDDETYCRAATEYARACSHAGYPIQDWRDDFPACTDKCDDSFVHRDCISCCPPTCTFEKQCLGSNLHCLDGCYCPDGLVMDNGTCISLENCPCGFHGLAYSVGSKIEQECTECVCVGGVWNCTEQDCPVQCSVVGDSHFTTFDGRHYSFIGMCQYILVKGTGKDKFTITLQKAPCEQNLGLVCLQSITLILEDDFNKQVTLGRGGQILTSPNQGFNLNGIVEIQTLSSLFILLKTTFGLKILFAIDGERIYIQLTSAWKRRTLGLCGTFNGNIRDDFLSPSGMIEGTPQLHANAWRVSSTCFAPVHVPVVDPCNINQQNIGYAAHCDVIHQELFAPCHIYISPGLYYQLCRHDACKCGSSCLCNALAHYAYLCGQHGVPIDFRTQISFCAVVCQKGMLYHHCSSFCLHSCISLSSPEQCSDDCAEGCNCPEGKFYEDTLNFCVPIFHCRCHYRGSVYQPGELIPTPSGLCQCSNGTVKCDELATPSAVHICPEGKEYFDCRFPDPELPAGGVNCETTCANLAMNFTCTPSSPCISGCVCAPGMAEHRGKCYVPESCPCIWKDWEYLSGEVIATPCYTCVCRRGMFNCTYYPCPAVCTIYGDRHYYSFDGLEYDYISDCQVFLIKKQSGFFLENKSTYQLWKAGYYIVVYFPEKDITILWDRKTTIHIKVGPQWKNKLSGLCGNFDKCTSNDMTTSNNLEVRNARVFGDSWALGQCESPDETIKPCEAHQNKFPYAKKECSILYSDIFASCRNVIDVTSFAKNCHEDTCNCNLGGDCECLCTSIAAYAYKCCQEGISIHWRSSTVCSLDCEYYNEGLGEGPYMLASYGQSGLVLGANMTSRSVFCLPRSSVHTSLFFYFMITPGLFKEKVSSLALVSLESAERPNYFLYVHDNDTLSLELWEANSAFHRRATFFHHQGLWIPGYSAFELYSKKGFFIIFTDSSVKASKYDDSEEFKHSSSFSIEEIQAAVPYRKMCEWRYEPCATPCFKTCSDPEALACKFLPPVEGCLPYCPKNMILDEVTLKCVYPRDCIPVIPTEPTLMPPAKPTVPMFTVWEMITPSDITVFDMLTPTTGLECEPQKFDPVYDCSQYICLNMEWQLYNWSLNCPKDVEMPDCGFRGRPVQVNSDICCPEWECPCRCSMLSELSIITFDGNNAALYSMASYILVRIPGEIIVAHIEKCSMNQNGNSLKKLAPSGRISGLCFKKLNVTTPIHKIIVNRLARKVEVDSIVVPLPFSSQELSIEDSGSMYVITTPAGLIIKWSHLTGIIDIHFGFRFNLSSYTEGLCGICNEDPDDDLRMQNGTIITNMEDIGLFIESWEIEKSFEVTMRRPVRNCTEHDCSQCIDLLNRRIFIPCHDKVSPEDFCEKMWINYTYFWNYECDALSAYVALCNKFDICIQWRTPDYCSLSCPEGKEYQPCVRPCEARTCLNQWFYGHTSCLNLREDCVCKVGTILHRPHSAQCIPEKECACTDSEDQPRTAGEIWNGGIDECTLYKCLENGSIIPIEPDCDEEPTPVCEREAEVVMGIIDKWTCCSKEVCGCDTTLCETSIPTCTNSQKLIVGHSPLSCCPQYKCECDPLKCPSISTPECREDQFMIQVRQEEPCCFSPFCVCESCTKPVPLCHDGEFLTVDLNSTHFCCPQYYCVCEPNLCPMPLLNCAEDMNLVKENVSGQCCPTWHCECNCENLIMPTCEVGEFTAIDHNFQSDCGCIQYLCEKDDVCVFQEVSVLNPGQSMIKYLEEDFCYAIECLEEKDNHTGFHTLNFTLVNCSKKCDVHQVYTPSPSDYGCCGTCKNVSCKFHMENGTSVVYAVGSTWHYNCTTYECVKTDEGAIILNYTMVCPPFNETECKMNEGIVKLYNEGCCKICKREERICQKVIIKSVIRKQDCMSQSPINVASCDGKCPSATIYNINIESHLRFCKCCRENGVRNLSVPLYCSGNGTEIMYTLQEPIDCTCQWN

SEQ ID NO: 4020 - protein, 1158 aa, Homo sapiens
MSLKPQQQQQQQQQQQQQQQQQQQQQQQPPPAAANVRKPGGSGLLASPAAAPSPSSSSVSSSSATAPSSVVAATSGGGRPGLGRGRNSNKGLPQSTISFDGIYANMRMVHILTSVVGSKCEVQVKNGGIYEGVFKTYSPKCDLVLDAAHEKSTESSSGPKREEIMESILFKCSDFVVVQFKDMDSSYAKRDAFTDSAISAKVNGEHKEKDLEPWDAGELTANEELEALENDVSNGWDPNDMFRYNEENYGVVSTYDSSLSSYTVPLERDNSEEFLKREARANQLAEEIESSAQYKARVALENDDRSEEEKYTAVQRNSSEREGHSINTRENKYIPPGQRNREVISWGSGRQNSPRMGQPGSGSMPSRSTSHTSDFNPNSGSDQRVVNGGVPWPSPCPSPSSRPPSRYQSGPNSLPPRAATPTRPPSRPPSRPSRPPSHPSAHGSPAPVSTMPKRMSSEGPPRMSPKAQRHPRNHRVSAGRGSISSGLEFVSHNPPSEAATPPVARTSPSGGTWSSVVSGVPRLSPKTHRPRSPRQNSIGNTPSGPVLASPQAGIIPTEAVAMPIPAASPTPASPASNRAVTPSSEAKDSRLQDQRQNSPAGNKENIKPNETSPSFSKAENKGISPVVSEHRKQIDDLKKFKNDFRLQPSSTSESMDQLLNKNREGEKSRDLIKDKIEPSAKDSFIENSSSNCTSGSSKPNSPSISPSILSNTEHKRGPEVTSQGVQTSSPACKQEKDDKEEKKDAAEQVRKSTLNPNAKEFNPRSFSQPKPSTTPTSPRPQAQPSPSMVGHQQPTPVYTQPVCFAPNMMYPVPVSPGVQPLYPIPMTPMPVNQAKTYRAGKVPNMPQQRQDQHHQSAMMHPASAAGPPIAATPPAYSTQYVAYSPQQFPNQPLVQHVPHYQSQHPHVYSPVIQGNARMMAPPTHAQPGLVSSSATQYGAHEQTHAMYACPKLPYNKETSPSFYFAISTGSLAQQYAHPNATLHPHTPHPQPSATPTGQQQSQHGGSHPAPSPVQHHQHQAAQALHLASPQQQSAIYHAGLAPTPPSMTPASNTQSPQNSFPAAQQTVFTIHPSHVQPAYTNPPHMAHVPQAHVQSGMVPSHPTAHAPMMLMTTQPPGGPQAALAQSALQPIPVSTTAHFPYMTHPSVLVQGISRKRQD

SEQ ID NO: 4021 - protein, 553 aa, Homo sapiens
MPLAFCGSENHSAAYRVDQGVLNNGCFVDALNVVPHVFLLFITFPILFIGWGSQSSKVHIHHSTWLHFPGHNLRWILTFMLLFVLVCEIAEGILSDGVTESHHLHLYMPAGMAFMAAVTSVVYYHNIETSNFPKLLIALLVYWTLAFITKTIKFVKFLDHAIGFSQLRFCLTGLLVILYGMLLLVERYIFFKTPREVKPPEDLQDLGVRFLQPFVNLLSKGTYWWMNAFIKTAHKKPIDLRAIGKLPIAMRALTNYQRLCEAFDAQRKDIQGTQGARAIWQALSHAFGRRLVLSSTFRILADLLGFAGPLCIFGIVDHLGKENDVFQPKTQFLGVYFVSSQEFLANAYVLAVLLFLALLLQRTFLQASYYVAIETGINLRGAIQTKIYNKIMHLSTSNLSMGEMTAGQICNLVAIDTNQLMWFFFLCPNLWAMPVQIIVGVILLYYILGVSALIGAAVIILLAPVQYFVATKLSQAQRSTLEYSNERLKQTNEMLRGIKLLKLYAWENIFRTRVETTRRKEMTSLRAFAIYTSISSWPHWTALPPSHPGHLHV

SEQ ID NO: 4022 - protein, 634 aa, Homo sapiens; identical to SEQ ID NO: 3119

SEQ ID NO: 4023 - protein, 1956 aa, Homo sapiens
MEFPIGSLETNNFRRFTPESLVEIEKQIAAKQGTKKAREKHREQKDQEEKPRPQLDLKACNQLPKFYGELPAELIGEPLEDLDPFYSTHRTFMVLNKGRTISRFSATRALWLFSPFNLIRRTAIKVSVHSWFSLFITVTILVNCVCMTRTDLPEKIEYVFTVIYTFEALIKILARGFCLNEFTYLRDPWNWLDFSVITLAYVGTAIDLRGISGLRTFRVLRALKTVSVIPGLKVIVGALIHSVKKLADVTILTIFCLSVFALVGLQLFKGNLKNKCVKNDMAVNETTNYSSHRKPDIYINKRGTSDPLLCGNGSDSGHCPDGYICLKTSDNPDFNYTSFDSFAWAFLSLFRLMTQDSWERLYQQTLRTSGKIYMIFFVLVIFLGSFYLVNLILAVVTMAYEEQNQATTDEIEAKEKKFQEALEMLRKEQEVLAALGIDTTSLHSHNGSPLTSKNASERRHRIKPRVSEGSTEDNKSPRSDPYNQRRMSFLGLASGKRRASHGSVFHFRSPGRDISLPEGVTDDGVFPGDHESHRGSLLLGGGAGQQGPLPRSPLPQPSNPDSRHGEDEHQPPPTSELAPGAVDVSAFDAGQKKTFLSAEYLDEPFRAQRAMSVVSIITSVLEELEESEQKCPPCLTSLSQKYLIWDCCPMWVKLKTILFGLVTDPFAELTITLCIVVNTIFMAMEHHGMSPTFEAMLQIGNIVFTIFFTAEMVFKIIAFDPYYYFQKKWNIFDCIIVTVSLLELGVAKKGSLSVLRSFRLLRVFKLAKSWPTLNTLIKIIGNSVGALGNLTIILAIIVFVFALVGKQLLGENYRNNRKNISAPHEDWPRWHMHDFFHSFLIVFRILCGEWIENMWACMEVGQKSICLILFLTVMVLGNLVVLNLFIALLLNSFSADNLTAPEDDGEVNNLQVALARIQVFGHRTKQALCSFFSRSCPFPQPKAEPELVVKLPLSSSKAENHIAANTARGSSGGLQAPRGPRDEHSDFIANPTVWVSVPIAEGESDLDDLEDDGGEDAQSFQQEVIPKGQQEQLQQVERCGDHLTPRSPGTGTSSEDLAPSLGETWKDESVPQVPAEGVDDTSSSEGSTVDCLDPEEILRKIPELADDLEEPDDCFTEGCIRHCPCCKLDTTKSPWDVGWQVRKTCYRIVEHSWFESFIIFMILLSSGSLAFEDYYLDQKPTVKALLEYTDRVFTFIFVFEMLLKWVAYGFKKYFTNAWCWLDFLIVNISLISLTAKILEYSEVAPIKALRTLRALRPLRALSRFEGMRVVVDALVGAIPSIMNVLLVCLIFWLIFSIMGVNLFAGKFWRCINYTDGEFSLVPLSIVNNKSDCKIQNSTGSFFWVNVKVNFDNVAMGYLALLQVATFKGWMDIMYAAVDSREVNMQPKWEDNVYMYLYFVIFIIFGGFFTLNLFVGVIIDNFNQQKKKIRGQDIFMTEEQKKYYNAMKKLGSKKPQKPIPRPLNKFQGFVFDIVTRQAFDITIMVLICLNMITMMVETDDQSEEKTKILGKINQFFVAVFTGECVMKMFALRQYYFTNGWNVFDFIVVVLSIASLIFSAILKSLQSYFSPTLFRVIRLARIGRILRLIRAAKGIRTLLFALMMSLPALFNIGLLLFLVMFIYSIFGMSSFPHVRWEAGIDDMFNFQTFANSMLCLFQITTSAGWDGLLSPILNTGPPYCDPNLPNSNGTRGDCGSPAVGIIFFTTYIIISFLIMVNMYIAVILENFNVATEESTEPLSEDDFDMFYETWEKFDPEATQFITFSALSDFADTLSGPLRIPKPNRNILIQMDLPLVPGDKIHCLDILFAFTKNVLGESGELDSLKANMEEKFMATNLSKSSYEPIATTLRWKQEDISATVIQKAYRSYVLHRSMALSNTPCVPRAEEEAASLPDEGFVAFTANENCVLPDKSETASATSFPPSYESVTRGLSDRVNMRTSSSIQNEDEATSMELIAPGP

SEQ ID NO: 4024 - protein, 671 aa, Homo sapiens
MPLAFCGSENHSAAYRVDQGVLNNGCFVDALNVVPHVFLLFITFPILFIGWGSQSSKVHIHHSTWLHFPGHNLRWILTFMLLFVLVCEIAEGILSDGVTESHHLHLYMPAGMAFMAAVTSVVYYHNIETSNFPKLLIALLVYWTLAFITKTIKFVKFLDHAIGFSQLRFCLTGLLVILYGMLLLVEVNVIRVRRYIFFKTPREVKPPEDLQDLGVRFLQPFVNLLSKGTYWWMNAFIKTAHKKPIDLRAIGKLPIAMRALTNYQRLCEAFDAQVRKDIQGTQGARAIWQALSHAFGRRLVLSSTFRILADLLGFAGPLCIFGIVDHLGKENDVFQPKTQFLGVYFVSSQEFLANAYVLAVLLFLALLLQRTFLQASYYVAIETGINLRGAIQTKIYNKIMHLSTSNLSMGEMTAGQICNLVAIDTNQLMWFFFLCPNLWAMPVQIIVGVILLYYILGVSALIGAAVIILLAPVQYFVATKLSQAQRSTLEYSNERLKQTNEMLRGIKLLKLYAWENIFRTRVETTRRKEMTSLRAFAIYTSISIFMNTAIPIAAVLITFVGHVSFFKEADFSPSVAFASLSLFHILVTPLFLLSSVVRSTVKALVSVQKLSEFLSSAEIREEQCAPHEPTPQGPASKYQAVGCEPQASSPGGLSGPHRPTAEPGPQCRWRC

SEQ ID NO: 4025 - protein, 497 aa, Homo sapiens [sequence omitted]

SEQ ID NO: 4026 - protein, 1905 aa, Homo sapiens
MASGLGSPSPCSAGSEEEDMDALLNNSLPPPHPENEEDPEEDLSETETPKLKKKKKPKKPRDPKIPKSKRQKKELGDSSGEGPEFVEEEEEVALRSDSEGSDYTPGKKKKKKLGPKKEKKSKSKRKEEEEEEDDDDDSKEPKSSAQLLEDWGMEDIDHVFSEEDYRTLTNYKAFSQFVRPLIAAKNPKIAVSKMMMVLGAKWREFSTNNPFKGSSGASVAAAAAAAVAVVESMVTATEVAPPPPPVEVPIRKAKTKEGKGPNARRKPKGSPRVPDAKKPKPKKVAPLKIKLGGFGSKRKRSSSEDDDLDVESDFDDASINSYSVSDGSTSRSSRSRKKLRTTKKKKKGEEEVTAVDGYETDHQDYCEVCQQGGEIILCDTCPRAYHMVCLDPDMEKAPEGKWSCPHCEKEGIQWEAKEDNSEGEEILEEVGGDLEEEDDHHMEFCRVCKDGGELLCCDTCPSSYHIHCLNPPLPEIPNGEWLCPRCTCPALKGKVQKILIWKWGQPPSPTPVPRPPDADPNTPSPKPLEGRPERQFFVKWQGMSYWHCSWVSELQLELHCQVMFRNYQRKNDMDEPPSGDFGGDEEKSRKRKNKDPKFAEMEERFYRYGIKPEWMMIHRILNHSVDKKGHVHYLIKWRDLPYDQASWESEDVEIQDYDLFKQSYWNHRELMRGEEGRPGKKLKKVKLRKLERPPETPTVDPTVKYERQPEYLDATGGTLHPYQMEGLNWLRFSWAQGTDTILADEMGLGKTVQTAVFLYSLYKEGHSKGPFLVSAPLSTIINWEREFEMWAPDMYVVTYVGDKDSRAIIRENEFSFEDNAIRGGKKASRMKKEASVKFHVLLTSYELITIDMAILGSIDWACLIVDEAHRLKNNQSKFFRVLNGYSLQHKLLLTGTPLQNNLEELFHLLNFLTPERFHNLEGFLEEFADIAKEDQIKKLHDMLGPHMLRRLKADVFKNMPSKTELIVRVELSPMQKKYYKYILTRNFEALNARGGGNQVSLLNVVMDLKKCCNHPYLFPVAAMEAPKMPNGMYDGSALIRASGKLLLLQKMLKNLKEGGHRVLIFSQMTKMLDLLEDFLEHEGYKYERIDGGITGNMRQEAIDRFNAPGAQQFCFLLSTRAGGLGINLATADTVIIYDSDWNPHNDIQAFSRAHRIGQNKKVMIYRFVTRASVEERITQVAKKKMMLTHLVVRPGLGSKTGSMSKQELDDILKFGTEELFKDEATDGGGDNKEGEDSSVIHYDDKAIERLLDRNQDETEDTELQGMNEYLSSFKVAQYVVREEEMGEEEEVEREIIKQEESVDPDYWEKLLRHHYEQQQEDLARNLGKGKRIRKQVNYNDGSQEDRDWQDDQSDNQSDYSVASEEGDEDFDERSEAPRRPSRKGLRNDKDKPLPPLLARVGGNIEVLGFNARQRKAFLNAIMRYGMPPQDAFTTQWLVRDLRGKSEKEFKAYVSLFMRHLCEPGADGAETFADGVPREGLSRQHVLTRIGVMSLIRKKVQEFEHVNGRWSMPELAEVEENKKMSQPGSPSPKTPTPSTPGDTQPNTPAPVPPAEDGIKIEENSLKEEESIEGEKEVKSTAPETAIECTQAPAPASEDEKVVVEPPEGEEKVEKAEVKERTEEPMETEPKGAADVEKVEEKSAIDLTPIVVEDKEEKKEEEEKKEVMLQNGETPKDLNDEKQKKNIKQRFMFNIADGGFTELHSLWQNEERAATVTKKTYEIWHRRHDYWLLAGIINHGYARWQDIQNDPRYAILNEPFKGEMNRGNFLEIKNKFLARRFKLLEQALVIEEQLRRAAYLNMSEDPSHPSMALNTRFAEVECLAESHQHLSKESMAGNKPANAVLHKVLKQLEELLSDMKADVTRLPATIARIPPVAVRLQMSERNILSRLANRAPEPTPQQVAQQQ

SEQ ID NO: 4027 - protein, 111 aa, Homo sapiens
MVHLTPEEKSAVTALWGKVNVDEVGGEALGRLLVVYPWTQRFFESFGDLSTPDAVMGNPKVKAHGKKVLGAFSDGLAHLDNLKGTFATLSELHCDKLHVDPENFRVSLWDA

SEQ ID NO: 4028 - protein, 852 aa, Homo sapiens
MAAATRRVFHLQPCENSPTMSQNGYFEDSSYYKCDTDDTFEAREEILGDEAFDTANSSIVSGESIRFFVNVNLEMQATNTENEATSGGCVLLHTSRKASIVLNETATSLDNVLRTMLRRFARDPDNNEPNCNLDLLMAMLFTDAGAPMRGKVHLLSDTIQGVTATVTGVRYQQSWLCIICTMKALQKRHVCISRLVRPQNWGENSCEVRFVILVLAPPKMKSTKTAMEVARTFATMFSDIAFRQKLLETRTEEEFKEALVHQRQLLTMVSHGPVAPRTKERSTVSLPAHRHPEPPKCKDFVPFGKGIREDIARRFPLYPLDFTDGIIGKNKAVGKYITTTLFLYFACLLPTIAFGSLNDENTDGAIDVQKTIAGQSIGGLLYALFSGQPLVILLTTAPLALYIQVIRVICDDYDLDFNSFYAWTGLWNSFFLALYAFFNLSLVMSLFKRSTEEIIALFISITFVLDAVKGTVKIFWKYYYGHYLDDYHTKRTSSLVSLSGLGASLNASLHTALNASFLASPTELPSATHSGQATAVLSLLIMLGTLWLGYTLYQFKKSPYLHPCVREILSDCALPIAVLAFSLISSHGFREIEMSKFRYNPSESPFAMAQIQSLSLRAVSGAMGLGFLLSMLFFIEQNLVAALVNAPENRLVKGTAYHWDLLLLAIINTGLSLFGLPWIHAAYPHSPLHVRALALVEERVENGHIYDTIVNVKETRLTSLGASVLVGLSLLLLPVPLQWIPKPVLYGLFLYIALTSLDGNQLVQRVALLLKEQTAYPPTHYIRRVPQRKIHYFTGLQVLQLLLLCAFGMSSLPYMKMIFPLIMIAMIPIRYILLPRIIEAKYLDVMDAEHRP

SEQ ID NO: 4029 - protein, 137 aa, Homo sapiens
MEERGDSEPTPGCSGLGPGGVRGFGDGGGAPSWAPEDAWMGTHPKYLEMMELDIGDATQVYVAFLVYLDLMESKSWHEVNCVGLPELQLICLVGTEIEGEGLQTVVPTPITASLSHNRYWRATFEEGKYLATLKDLH

SEQ ID NO: 4030 - protein, 1328 aa, Homo sapiens
DSELLKFYRSRSRCGIINDPSNSSFLECHGVVNVTAYYRTCLFRLCQSGGNESELCDSVARYASACKNADVEVGPWRTYDFCPLECPENSHFEECITCTETCETLTLGPICVDSCSEGCQCDEGYALLGSQCVTRSECGCNFEGHQLATNETFWVDLDCQIFCYCSGTDNRVHCETIPCKDDEYCMEEGGLYYCQARTDASCIVSGYGHYLTFDGFPFDFQTSCPLILCTTGSRPSSDSFPKFVVTAKNEDRDPSLALWVKQVDVTVFGYSIVIHRAYKHTVLVNSERLYLPLKLGQGKINIFSFGFHVVVETDFGLKVVYDWKTFLSITVPRSMQNSTYGLCGRYNGNPDDDLEMPMGLLASSVNEFGQSWVKRDTFCQVGCGDRCPSCAKVEGFSKVQQLCSLIPNQNAAFSKCHSKVNPTFFYKNCLFDSCIDGGAVQTACSWLQNYASTCQTQGITVTGWRNYTSCTVTCPPNSHYESCVSVCQPRCAAIRLKSDCSHYCVEGCHCDAGYVLNGKSCILPHSCGCYSDGKYYEPKQLFWNSDCTRRCRCFRRNVIQCDPRQCKSDEECALRNGVRGCFSTKTSYCLAAGGGVFRTFDGAFLRFPANCAFVLSTICQKLPDISFQLIINFDKWSAPNLTIISPVYFYINEEQILINDRNTVKVNGTQVNVPFITGLATKIYSSEGFLVIDTSPDIQIYYNGFNVIKISISERLQNKVCGLCGNFNGDLTDDYVTLRGKPVVSSVVLAQSWKTNGMQKSCNELQFSQYAAMCDNVHIQKMQGDGYCLKLTDMKGFFQPCYGLLDPLPFYESCYLDGCYSHKKFQLCGSLAAYGEACRSFGILSTEWIEKENCSGVVEDPCVGADCPNRTCELGNGRELCGCIEPPPYGNNSHDIIDAEVTCKAAQMEVSISKCKLFQLGFEREGVRINDRQCTGIEGEDFISFQINNTKGNCGNIVQSNGTHIMYKNTLWIESANNTGNIITRDRTINVEFSCAYELDIKISLDSVVKPMLSVINLTVPTQEGSFITKMALYKNASYKHPYRQGEVVLTTRDVLYVGVFVVGADATHLILTLNKCYATPTRDSNDKLRYFIIEGGCQNLKDNTIGIEENAVSLTCRFHVTVFKFIGDYDEVHLHCAVSLCDSEKYSCKITCPHNSRIATDYTKEPKEQIISVGPIRRKRLDWCEDNGGCEQICTSRVDGPLCSCVTGTLQEDGKSCRGRHSSTLGQAAGRHGRFFTTRRRNSDLKATRSATLPRKLQKLRRKDGEHAQGILGPLNKQTNNNNKKTLLFHLKYKASNSSMELQVWTLLLIMIQISLWHFVYKSGTTS

SEQ ID NO: 4031 - protein, 957 aa, Homo sapiens
MSLKPQQQQQQQQQQQQQQQQQQQQQQQPPPAAANVRKPGGSGLLASPAAAPSPSSSSVSSSSATAPSSVVAATSGGGRPGLGRGRNSNKGLPQSTISFDGIYANMRMVHILTSVVGSKCEVQVKNGGIYEGVFKTYSPKCDLVLDAAHEKSTESSSGPKREEIMESILFKCSDFVVVQFKDMDSSYAKRDAFTDSAISAKVNGEHKEKDLEPWDAGELTANEELEALENDVSNGWDPNDMFRYNEENYGVVSTYDSSLSSYTVPLERDNSEEFLKREARANQLAEEIESSAQYKARVALENDDRSEEEKYTAVQRNSSEREGHSINTRENKYIPPGQRNREVISWGSGRQNSPRMGQPGSGSMPSRSTSHTSDFNPNSGSDQRVVNGGVPWPSPCPSPSSRPPSRYQSGPNSLPPRAATPTRPPSRPPSRPSRPPSHPSAHGSPAPVSTMPKRMSSEGPPRMSPKAQRHPRNHRVSAGRGSISSGLEFVSHNPPSEAATPPVARTSPSGGTWSSVVSGVPRLSPKTHRPRSPRQNSIGNTPSGPVLASPQAGIIPTEAVAMPIPAASPTPASPASNRAVTPSSEAKDSRLQDQRQNSPAGNKENIKPNETSPSFSKAENKGISPVVSEHRKQIDDLKKFKNDFRLQPSSTSESMDQLLNKNREGEKSRDLIKDKIEPSAKDSFIENSSSNCTSGSSKPNSPSISPSILSNTEHKRGPEVTSQGVQTSSPACKQEKDDKEEKKDAAEQVRKSTLNPNAKEFNPRSFSQPKPSTTPTSPRPQAQPSPSMVGHQQPTPVYTQPVCFAPNMMYPVPVSPGVQPLYPIPMTPMPVNQAKTYRAVPNMPQQRQDQHHQSAMMHPASAAGPPIAATPPAYSTQYVAYSPQQFPNQPLVQHVPHYQSQHPHVYSPVIQGNARMMAPPTHAQPGLVSSSATQYGAHEQTHAMYGRKHFVCLFQCV

SEQ ID NO: 4032 - protein, 530 aa, Homo sapiens
MPLRSPSPSPWPGPLHAEMHVLLALSGRGCLVLRHVVMGSHSPCAHTPCAPPAPTGAKRTLAASGSQSSNGPEPGGQQLKTRTLSGMASKTTTTIIPKRIAHSPSLQSLKKPIIPKEFGGKVPTVIRQRYLNLFIEECLKFCTSNQEAIEKALNEEKVAYDRSPSKNIYLNVAVNTLKKLRGLAPSAVPGLSKTSGRRVVSHEVVLGGRLAAKTSFSLSRPSSPRVEDLKGAALYSRLREYLLTQDQLKENGYPFPHPERPGGAIIFTAEEKRPKDSSCRTCCRCGTEYLVSSSGRCIRDEECYYHWGRLRRNRVAGGWETQYMCCSAAAGSVGCQVAKQHVQDGRKERLEGFVKTFEKELSGDTHPGIYALDCEMSYTTYGLELTRVTVVDTDVHVVYDTFVKPDNEIVDYNTRFSGVTEADLADTSVTLRDVQAVLLSMFSADTILIGHSLESDLLALKVIHSTVVDTSVLFPHRLGLPYKRSLRNLMADYLRQIIQDNVDGHSSSEDAGACMHLVIWKVREDAKTKR

SEQ ID NO: 4033 - protein, 618 aa, Homo sapiens
AFCGSENHSAAYRVDQGVLNNGCFVDALNVVPHVFLLFITFPILFIGWGSQSSKVHIHHSTWLHFPGHNLRWILTFMLLFVLVCEIAEGILSDGVTESHHLHLYMPAGMAFMAAVTSVVYYHNIETSNFPKLLIGIQLLLSTSVSDNRLSTQHCRTGLCKKPLGLVLGALLIPCVTLHKTSKLSEPRIPHLGRKTLLVYWTLAFITKTIKFVKFLDHAIGFSQLRFCLTGLLVILYGMLLLVEVNVIRVRRYIFFKTPREVKPPEDLQDLGVRFLQPFVNLLSKGTYWWMNAFIKTAHKKPIDLRAIGKLPIAMRALTNYQRLCEAFDAQVRKDIQGTQGARAIWQALSHAFGRRLVLSSTFRILADLLGFAGPLCIFGIVDHLGKENDVFQPKTQFLGVYFVSSQEFLANAYVLAVLLFLALLLQRTFLQASYYVAIETGINLRGAIQTKIYNKIMHLSTSNLSMGEMTAGQICNLVAIDTNQLMWFFFLCPNLWAMPVQIIVGVILLYYILGVSALIGAAVIILLAPVQYFVATKLSQAQRSTLEYSNERLKQTNEMLRGIKLLKLYAWENIFRTRVETTRRKEMTSLRAFAIYTSISSWPHWTALPPSHPGHLHV

SEQ ID NO: 4034 - protein, 2273 aa, Homo sapiens
MMPQKKRRRKKDIDFLALYEAELLNYASEDDEGELEHEYYKARVYEVVTATGDVRGAGTDANVFITLFGENGLSPKLQLTSKSKSAFEKGNVDVFRVRTNNVGLIYKVRIEHDNTGLNASWYLDHVIVTDMKRPHLRYYFNCNNWLSKVEGDRQWCRDLLASFNPMDMPRGNKYEVKVYTGDVIGAGTDADVFINIFGEYGDTGERRLENEKDNFEKGAEDRFILDAPDLGQLMKINVGHNNKGGSAGWFLSQIVIEDIGNKRKYDFPLNRWLALDEDDGKIQRDILVGGAETTAITYIVTVFTGDVRGAGTKSKIYLVMYGARGNKNSGKIFLEGGVFDRGRTDIFHIELAVLLSPLSRVSVGHGNVGVNRGWFCEKVVILCPFTGIQQTFPCSNWLDEKKADGLIERQLYEMVSLRKKRLKKFPWSLWVWTTDLKKAGTNSPIFIQIYGQKGRTDEILLNPNNKWFKPGIIEKFRIELPDLGRFYKIRVWHDKRSSGSGWHLERMTLMNTLNKDKYNFNCNRWLDANEDDNEIVREMTAEGPTVRRIMGMARYHVTVCTGELEGAGTDANVYLCLFGDVGDTGERLLYNCRNNTDLFEKGNADEFTIESVTMRNVRRVRIRHDGKGSGSGWYLDRVLVREEGQPESDNVEFPCLRWLDKDKDDGQLVRELLPSDSSATLKNFRYHISLKTGDVSGASTDSRVYIKLYGDKSDTIKQVLLVSDNNLKDYFERGRVDEFTLETLNIGNINRLVIGHDSTGMHASWFLGSVQIRVPRQGKQYTFPANRWLDKNQADGRLEVELYPSEVVEIQKLVHYEVEIWTGDVGGAGTSARVYMQIYGEKGKTEVLFLSSRSKVFERASKDTFQLEAADVGEVYKLRLGHTGEGFGPSWFVDTVWLRHLVVREVDLTPEEEARKKKEKDKLRQLLKKERLKAKLQRKKKKRKGSDEEDEGEEEESSSSEESSSEEEEMEEEEEEEEFGPGMQEVIEQHKFEAHRWLARGKEDNELVVELVPAGKPGPERNTYEVQVVTGNVPKAGTDANVYLTIYGEEYGDTGERPLKKSDKSNKFEQGQTDTFTIYAIDLGALTKIRIRHDNTGNRAGWFLDRIDITDMNNEITYYFPCQRWLAVEEDDGQLSRELLPVDESYVLPQSEEGRGGGDNNPLDNLALEQKDKSTTFSVTIKTGVKKNAGTDANVFITLFGTQDDTGMTLLKSSKTNSDKFERDSIEIFTVETLDLGDLWKVRLGHDNTGKAPGWFVDWVEVDAPSLGKCMTFPCGRWLAKNEDDGSIIRDLFHAELQTRLYTPFVPYEITLYTSDVFAAGTDANIFIIIYGCDAVCTQQKYLCTNKREQKQFFERKSASRFIVELEDVGEIIEKIRIGHNNTGMNPGWHCSHVDIRRLLPDKDGAETLTFPCDRWLATSEDDKKTIRELVPYDIFTEKYMKDGSLRQVYKEVEEPLDIVLYSVQIFTGNIPGAGTDAKVYITIYGDLGDTGERYLGKSENRTNKFERGTADTFIIEAADLGVIYKIKLRHDNSKWCADWYVEKVEIWNDTNEDEFLFLCGRWLSLKKEDGRLERLFYEKEYTGDRSSNCSSPADFWEIALSSKMADVDISTVTGPMADYVQEGPIIPYYVSVTTGKHKDAATDSRAFIFLIGEDDERSKRIWLDYPRGKRGFSRGSVEEFYVAGLDVGIIKKIELGHDGASPESCWLVEELCLAVPTQGTKYMLNCNCWLAKDRGDGITSRVFDLLDAMVVNIGVKVLYEMTVWTGDVVGGGTDSNIFMTLYGINGSTEEMQLDKKKARFEREQNDTFIMEILDIAPFTKMRIRIDGLGSRPEWFLERILLKNMNTGDLTMFYYGDWLSQRKGKKTLVCEMCAVIDEEEMMEWTSYTVAVKTSDILGAGTDANVFIIIFGENGDSGTLALKQSANWNKFERNNTDTFNFPDMLSLGHLCKLRVWHDNKGIFPGWHLSYVDVKDNSRDETFHFQCDCWLSKSEGDGQTVRDFACANNKICDELEETTYEIVIETGNGGETRENVWLILEGRKNRSKEFLMENSSRQRAFRKGTTDTFEFDSIYLGDIASLCVGHLAREDRFIPKRELAWHVKTITITEMEYGNVYFFNCDCLIPLKRKRKYFKVFEVTKTTESFASKVQSLVPVKYEVIVTTGYEPGAGTDANVFVTIFGANGDTGKRELKQKMRNLFERGSTDRFFLETLELGELRKVRLEHDSSGYCSGWLVEKVEVTNTSTGVATIFNCGRWLDKKRGDGLTWRDLFPSV

SEQ ID NO: 4035 - protein, 1903 aa, Homo sapiens
MASGLGSPSPCSAGSEEEDMDALLNNSLPPPHPENEEDPEEDLSETETPKLKKKKKPKKPRDPKIPKSKRQKKELGDSSGEGPEFVEEEEEVALRSDSEGSDYTPGKKKKKKLGPKKEKKSKSKRKEEEEEEDDDDDSKEPKSSAQLLEDWGMEDIDHVFSEEDYRTLTNYKAFSQFVRPLIAAKNPKIAVSKMMMVLGAKWREFSTNNPFKGSSGASVAAAAAAAVAVVESMVTATEVAPPPPPVEVPIRKAKTKEGKGPNARRKPKGSPRVPDAKKPKPKKVAPLKIKLGGFGSKRKRSSSEDDDLDVESDFDDASINSYSVSDGSTSRSSRSRKKLRTTKKKKKGEEEVTAVDGYETDHQDYCEVCQQGGEIILCDTCPRAYHMVCLDPDMEKAPEGKWSCPHCEKEGIQWEAKEDNSEGEEILEEVGGDLEEEDDHHMEFCRVCKDGGELLCCDTCPSSYHIHCLNPPLPEIPNGEWLCPRCTCPALKGKVQKILIWKWGQPPSPTPVPRPPDADPNTPSPKPLEGRPERQFFVKWQGMSYWHCSWVSELQLELHCQVMFRNYQRKNDMDEPPSGDFGGDEEKSRKRKNKDPKFAEMEERFYRYGIKPEWMMIHRILNHSVDKKGHVHYLIKWRDLPYDQASWESEDVEIQDYDLFKQSYWNHRELMRGEEGRPGKKLKKVKLRKLERPPETPTVDPTVKYERQPEYLDATGGTLHPYQMEGLNWLRFSWAQGTDTILADEMGLGKTVQTAVFLYSLYKEGHSKGPFLVSAPLSTIINWEREFEMWAPDMYVVTYVGDKDSRAIIRENEFSFEDNAIRGGKKASRMKKEASVKFHVLLTSYELITIDMAILGSIDWACLIVDEAHRLKNNQSKFFRVLNGYSLQHKLLLTGTPLQNNLEELFHLLNFLTPERFHNLEGFLEEFADIAKEDQIKKLHDMLGPHMLRRLKADVFKNMPSKTELIVRVELSPMQKKYYKYILTRNFEALNARGGGNQVSLLNVVMDLKKCCNHPYLFPVAAMEAPKMPNGMYDGSALIRASGKLLLLQKMLKNLKEGGHRVLIFSQMTKMLDLLEDFLEHEGYKYERIDGGITGNMRQEAIDRFNAPGAQQFCFLLSTRAGGLGINLATADTVIIYDSDWNPHNDIQAFSRAHRIGQNKKVMIYRFVTRASVEERITQVAKKKMMLTHLVVRPGLGSKTGSMSKQELDDILKFGTEELFKDEATDGGGDNKEGEDSSVIHYDDKAIERLLDRNQDETEDTELQGMNEYLSSFKVAQYVVREEEMGEEEVEREIIKQEESVDPDYWEKLLRHHYEQQQEDLARNLGKGKRIRKQVNYNDGSQEDRDWQDDQSDNQSDYSVASEEGDEDFDERSEAPRRPSRKGLRNDKDKPLPPLLARVGGNIEVLGFNARQRKAFLNAIMRYGMPPQDAFTTQWLVRDLRGKSEKEFKAYVSLFMRHLCEPGADGAETFADGVPREGLSRQHVLTRIGVMSLIRKKVQEFEHVNGRWSMPELAEVEENKKMSQPGSPSPKTPTPSTPGDTQPNTPAPVPPADGIKIEENSLKEEESIEGEKEVKSTAPETAIECTQAPAPASEDEKVVVEPPEGEEKVEKAEVKERTEEPMETEPKGAADVEKVEEKSAIDLTPIVVEDKEEKKEEEEKKEVMLQNGETPKDLNDEKQKKNIKQRFMFNIADGGFTELHSLWQNEERAATVTKKTYEIWHRRHDYWLLAGIINHGYARWQDIQNDPRYAILNEPFKGEMNRGNFLEIKNKFLARRFKLLEQALVIEEQLRRAAYLNMSEDPSHPSMALNTRFAEVECLAESHQHLSKESMAGNKPANAVLHKVLKQLEELLSDMKADVTRLPATIARIPPVAVRLQMSERNILSRLANRAPEPTPQQVAQQQ

SEQ ID NO: 4036 - protein, 2365 aa, Homo sapiens
MEEVPGDALCEHFEANILTQNRCQNCFHPEEAHGARYQELRSPSGAEVPYCDLPRCPPAPEDPLSASTSGCQSVVDPGLRPGPKRGPSPSAGLPEEGPTAAPRSRSRELEAVPYLEGLTTSLCGSCNEDPGSDPTSSPDSATPDDTSNSSSVDWDTVERQEEEAPSWDELAVMIPRRPREGPRADSSQRAPSLLTRSPVGGDAAGQKKEDTGGGGRSAGQHWARLRGESGLSLERHRSTLTQASSMTPHSGPRSTTSQASPAQRDTAQAASTREIPRASSPHRITQRDTSRASSTQQEISRASSTQQETSRASSTQEDTPRASSTQEDTPRASSTQWNTPRASSPSRSTQLDNPRTSSTQQDNPQTSFPTCTPQRENPRTPCVQQDDPRASSPNRTTQRENSRTSCAQRDNPKASRTSSPNRATRDNPRTSCAQRDNPRASSPSRATRDNPTTSCAQRDNPRASRTSSPNRATRDNPRTSCAQRDNPRASSPSRATRDNPTTSCAQRDNPRASRTSSPNRATRDNPRTSCAQRDNPRASSPNRAARDNPTTSCAQRDNPRASRTSSPNRATRDNPRTSCAQRDNPRASSPNRATRDNPTTSCAQRDNPRASRTSSPNRATRDNPRTSCAQRDNPRASSPNRTTQQDSPRTSCARRDDPRASSPNRTIQQENPRTSCALRDNPRASSPSRTIQQENPRTSCAQRDDPRASSPNRTTQQENPRTSCARRDNPRASSRNRTIQRDNPRTSCAQRDNPRASSPNRTIQQENLRTSCTRQDNPRTSSPNRATRDNPRTSCAQRDNLRASSPIRATQQDNPRTCIQQNIPRSSSTQQDNPKTSCTKRDNLRPTCTQRDRTQSFSFQRDNPGTSSSQCCTQKENLRPSSPHRSTQWNNPRNSSPHRTNKDIPWASFPLRPTQSDGPRTSSPSRSKQSEVPWASIALRPTQGDRPQTSSPSRPAQHDPPQSSFGPTQYNLPSRATSSSHNPGHQSTSRTSSPVYPAAYGAPLTSPEPSQPPCAVCIGHRDAPRASSPPRYLQHDPFPFFPEPRAPESEPPHHEPPYIPPAVCIGHRDAPRASSPPRHTQFDPFPFLPDTSDAEHQCQSPQHEPLQLPAPVCIGYRDAPRASSPPRQAPEPSLLFQDLPRASTESLVPSMDSLHECPHIPTPVCIGHRDAPSFSSPPRQAPEPSLFFQDPPGTSMESLAPSTDSLHGSPVLIPQVCIGHRDAPRASSPPRHPPSDLAFLAPSPSPGSSGGSRGSAPPGETRHNLEREEYTVLADLPPPRRLAQRQPGPQAQCSSGGRTHSPGRAEVERLFGQERRKSEAAGAFQAQDEGRSQQPSQGQSQLLRRQSSPAPSRQVTMLPAKQAELTRRSQAEPPHPWSPEKRPEGDRQLQGSPLPPRTSARTPERELRTQRPLESGQAGPRQPLGVWQSQEEPPGSQGPHRHLERSWSSQEGGLGPGGWWGCGEPSLGAAKAPEGAWGGTSREYKESWGQPEAWEEKPTHELPRELGKRSPLTSPPENWGGPAESSQSWHSGTPTAVGWGAEGACPYPRGSERRPELDWRDLLGLLRAPGEGVWARVPSLDWEGLLELLQARLPRKDPAGHRDDLARALGPELGPPGTNDVPEQESHSQPEGWAEATPVNGHSPALQSQSPVQLPSPACTSTQWPKIKVTRGPATATLAGLEQTGPLGSRSTAKGPSLPELQFQPEEPEESEPSRGQDPLTDQKQADSADKRPAEGKAGSPLKGRLVTSWRMPGDRPTLFNPFLLSLGVLRWRRPDLLNFKKGWMSILDEPGEPPSPSLTTTSTSQWKKHWFVLTDSSLKYYRDSTAEEADELDGEIDLRSCTDVTEYAVQRNYGFQIHTKDAVYTLSAMTSGIRRNWIEALRKTVRPTSAPDVTKLSDSNKENALHSYSTQKGPLKAGEQRAGSEVISRGGPRKADGQRQALDYVELSPLTQASPQRARTPARTPDRLAKQEELERDLAQRSEERRKWFEATDSRTPEVPAGEGPRRGLGAPLTEDQQNRLSEEIEKKWQELEKLPLRENKRVPLTALLNQSRGERRGPPSDGHEALEKEVQALRAQLEAWRLQGEAPQSALRSQEDGHIPPGYISQEACERSLAEMESSHQQVMEELQRHHERELQRLQQEKEWLLAEETAATASAIEAMKKAYQEELSRELSKTRSLQQGPDGLRKQHQSDVEALKRELQVLSEQYSQKCLEIGALMRQAEEREHTLRRCQQEGQELLRHNQELHGRLSEEIDQLRGFIASQGMGNGCGRSNERSSCELEVLLRVKENELQYLKKEVQCLRDELQMMQKDKRFTSGKYQDVYVELSHIKTRSEREIEQLKEHLRLAMAALQEKESMRNSLAE

SEQ ID NO: 4037 - protein, 353 aa, Homo sapiens
MGSLYSEYLNPNKVQEHYNYTKETLETQETTSRQVASAFIVILCCAIVVENLLVLIAVARNSKFHSAMYLFLGNLAASDLLAGVAFVANTLLSGSVTLRLTPVQWFAREGSAFITLSASVFSLLAIAIERHVAIAKVKLYGSDKSCRMLLLIGASWLISLVLGGLPILGWNCLGHLEACSTVLPLYAKHYVLCVVTIFSIILLAIVALYVRIYCVVRSSHADMAAPQTLALLKTVTIVLGVFIVCWLPAFSILLLDYACPVHSCPILYKAHYFFAVSTLNSLLNPVIYTWRSRDLRREVLRPLQCWRPGVGVQGRRRGGTPGHHLLPLRSSSSLERGMHMPTSPTFLEGNTVV

SEQ ID NO: 4038 - protein, 2645 aa, Homo sapiens
MSIYDINREQDYVKNSEGILGENELRPPSQLHSLLEKIETGSLSEKIFETVSLSSDSLFQRAVSLLHTSYLDSSSEHGFQYSQVTLVKNDIFLNEYKTFYQQKKASSYTQEELQDTYGFLLFDTEKQAKLVCQCGLRVGSSAVTTLGDPAKGVYISKYSDCLHSRPWYHGKSGYVVIFNIIKYYFYELSGNTVIERPRQICPYVIVAFRYRESKTMAPPAHKSILERSENVLMSPWKGKLIVQDRMLCDIALWSTYGAMIPTQLPQELDFKYVMKVSSLKKRLPEAAFRKQNYLEEKVCFQDLCFNLYEVELSNRQGENIDKLTECIKNKQLAIIKCLEDRGFFILLTSSALLSEPDFGGKQMGLHGLHLFRSPLSTGVKDLKVEDDISMKVIPILSTLNCALLETKKSLPEERIHPNTLVKRHFQELYKADRSPSLSVAPQDRMKDPTFLGKLPSGFDLIPPAEKCPSESLTQLNSYFSDPSAYILEVSTALDLLAEHPQSPCVSDGICDAGFSLVMTPDPEFLVSEAEVRKETETKKDSEEMLKAKKRVFPLSPASNLRVQPKRKASMPHMVQSKKVNLCRPFPKRTASRADNSSDSPTTLKLVKGQFPQKRKRGAEVLTAQFVQKTKLDRKNQEAPISKDVPVPTNAKRARKQEKSPVKTVPRAKPPVKKSPQKQRVNIVKGNENPRNRKQLQPVKGETASKLQSEISRGCQEDGISINSVQPENTTAAHNDLPENSIVNYDSQALNMLADLALSSATSSTPVSEARNLHCSSELPQNDVLLSKENSLRGTSDHEYHRGVKTQKGELLPNPSSDRKSNSGSDLTVSQDEESLVPCSQAPAKAQSALTEEMLESSDASQSSSVSVEHSYALLLTEHSKKHLQEREILSPLFPRNGTKSPEAATPVGKVMPFRHQPGLLLQQKPPDDPVVKPKDRPPSARVKKSSCSRIVLSCDDSVKITFKCETEYAFSLDSKYTNNPLEKTVVRALHGPWNTDLPDNVEEVKLLLHMWVALFYSNQNKIIRSSRKVVEHSNPAKYVSINSTLESCELREIEESLGLEKCSADSLLETNEISRAHAAEVSFRDPNCLLPFIKTPLTQGLELCVQNEQKKTFARECDPDTQEDQNFICSYNNEVTGEEAKQESLETSNLVLSGIGSTQTNGPSVPSEEEIVQPLDSTRVASYSGTVTQATFTRTYDGPGSQPVICQSSVYGTLENKVDILDAAVQTKTGTLQDLIQHGSPINNECHPSLERKDDNMGCAVINPEPITLTFEKNAHVPIQTEGVNTADERTTFKKELIKQVSPAASLRHPVSTSENARTQGLRDIPSLVVAGQKGTKYLCASSVGGETLDKAVCSLQKETPLPVSLPSDKTMVMEALSLAKSSSHLSPSEEVRCTQDFLSQTQSLLGLSSEGLLELTQVEVDSSSASTTLGRQCSLNCISSGCHTSGDSLELRKNHKNGPNTENMNLEAFDSVFIKQTSLSVSREVSLELSEEDSDIDLALTISPPTSPREEMPAGEIEQFEEAPFSNLELQDVAEEIGEPEEVALTESREVSSADNVSVYPSVSEEPVENKERKGDNLQPVTLILSKENCTLEIAEEINVTSDFPFDSVIEEVSPASSPEPPVPVKETRPYQAVTPCILKLHGTQCEKSNQISQCESEDLGITEKENVFVGPTHPVGQDNFTQVQQMQVSAEMPLILTDHPGRTGRPTLPGKVTEEIVSSEHDEGLSFSGKVQCYGRELNQPASAAKCTGDFSPSPEKLVKSGNPLQPVSIENRNLDLKHLVLESSEPPFGPRNVIENKSLSDTLVSTTAPSGIVNVSVKQQTSPKSSQNHLFPGDLKTDEGIYLQVKSLTAASVDGAYSTQGCMCSVVPTLCSSSDNATLTHYVRPINAEPVFQAQEIPAGRMASLLKNGEPEAELHKETTGPGTAGPQSNTTSSLKGERKAIHTLQDVSTCETKELLNVGVSSLCAGPYQNTADTKENLSKEPLASFVSESFDTSVCGIATEHVEIENSGEGLRAEAGSETLGRDGEVGVNSDMHYELSGDSDLDLLGDCRNPRLDLEDSYTLRGSYTRKKDVPTDGYESSLNFHNNNQEDWGCSSWVPGMETSLPPGHWTAAVKKEEKCVPPYVQIRDLHGILRTYANFSITKELKDTMRTSHGLRRHPSFSANCGLPSSWTSTWQVADDLTQNTLDLEYLRFAHKLKQTIKNGDSQHSASSANVFPKESPTQISIGAFPSTKISEAPFLHPAPRSRSPLLVTVVESDPRPQGQPRRGYTASSLDSSSSWRERCSHNRDLRNSQRNHTVSFHLNKLKYNSTVKESRNDISLILNEYAEFNKVMKNSNQFIFQDKELNDVSGEATAQEMYLPFPGRSASYEDIIIDVCTNLHVKLRSVVKEACKSTFLFYLVETEDKSFFVRTKNLLRKGGHTEIEPQHFCQAFHRENDTLIIIIRNEDISSHLHQIPSLLKLKHFPSVIFAGVDSPGDVLDHTYQELFRAGGFVISDDKILEAVTLVQLKEIIKILEKLNGNGRWKWLLHYRENKKLKEDERVDSTAHKKNIMLKSFQSANIIELLHYHQCDSRSSTKAEILKCLLNLQIQHIDARFAVLLTDKPTIPREVFENSGILVTDVNNFIENIEKIAAPFRSSYW

SEQ ID NO: 4039 - protein, 1899 aa, Homo sapiens
MASGLGSPSPCSAGSEEEDMDALLNNSLPPPHPENEEDPEEDLSETETPKLKKKKKPKKPRDPKIPKSKRQKKERMLLCRQLGDSSGEGPEFVEEEEEVALRSDSEGSDYTPGKKKKKKLGPKKEKKSKSKRKEEEEEEDDDDDSKEPKSSAQLLEDWGMEDIDHVFSEEDYRTLTNYKAFSQFVRPLIAAKNPKIAVSKMMMVLGAKWREFSTNNPFKGSSGASVAAAAAAAVAVVESMVTATEVAPPPPPVEVPIRKAKTKEGKGPNARRKPKGSPRVPDAKKPKPKKVAPLKIKLGGFGSKRKRSSSEDDDLDVESDFDDASINSYSVSDGSTSRSSRSRKKLRTTKKKKKDHQDYCEVCQQGGEIILCDTCPRAYHMVCLDPDMEKAPEGKWSCPHCEKEGIQWEAKEDNSEGEEILEEVGGDLEEEDDHHMEFCRVCKDGGELLCCDTCPSSYHIHCLNPPLPEIPNGEWLCPRCTCPALKGKVQKILIWKWGQPPSPTPVPRPPDADPNTPSPKPLEGRPERQFFVKWQGMSYWHCSWVSELQLELHCQVMFRNYQRKNDMDEPPSGDFGGDEEKSRKRKNKDPKFAEMEERFYRYGIKPEWMMIHRILNHSVDKKGHVHYLIKWRDLPYDQASWESEDVEIQDYDLFKQSYWNHRELMRGEEGRPGKKLKKVKLRKLERPPETPTVDPTVKYERQPEYLDATGGTLHPYQMEGLNWLRFSWAQGTDTILADEMGLGKTVQTAVFLYSLYKEGHSKGPFLVSAPLSTIINWEREFEMWAPDMYVVTYVGDKDSRAIIRENEFSFEDNAIRGGKKASRMKKEASVKFHVLLTSYELITIDMAILGSIDWACLIVDEAHRLKNNQSKFFRVLNGYSLQHKLLLTGTPLQNNLEELFHLLNFLTPERFHNLEGFLEEFADIAKEDQIKKLHDMLGPHMLRRLKADVFKNMPSKTELIVRVELSPMQKKYYKYILTRNFEALNARGGGNQVSLLNVVMDLKKCCNHPYLFPVAAMEAPKMPNGMYDGSALIRASGKLLLLQKMLKNLKEGGHRVLIFSQMTKMLDLLEDFLEHEGYKYERIDGGITGNMRQEAIDRFNAPGAQQFCFLLSTRAGGLGINLATADTVIIYDSDWNPHNDIQAFSRAHRIGQNKKVMIYRFVTRASVEERITQVAKKKMMLTHLVVRPGLGSKTGSMSKQELDDILKFGTEELFKDEATDGGGDNKEGEDSSVIHYDDKAIERLLDRNQDETEDTELQGMNEYLSSFKVAQYVVREEEMGEEEEVEREIIKQEESVDPDYWEKLLRHHYEQQQEDLARNLGKGKRIRKQVNYNDGSQEDRDWQDDQSDNQSDYSVASEEGDEDFDERSEAPRRPSRKGLRNDKDKPLPPLLARVGGNIEVLGFNARQRKAFLNAIMRYGMPPQDAFTTQWLVRDLRGKSEKEFKAYVSLFMRHLCEPGADGAETFADGVPREGLSRQHVLTRIGVMSLIRKKVQEFEHVNGRWSMPELAEVEENKKMSQPGSPSPKTPTPSTPGDTQPNTPAPVPPAEDGIKIEENSLKEEESIEGEKEVKSTAPETAIECTQAPAPASEDEKVVVEPPEGEEKVEKAEVKERTEEPMETEPKGAADVEKVEEKSAIDLTPIVVEDKEEKKEEEEKKEVMLQNGETPKDLNDEKQKKNIKQRFMFNIADGGFTELHSLWQNEERAATVTKKTYEIWHRRHDYWLLAGIINHGYARWQDIQNDPRYAILNEPFKGEMNRGNFLEIKNKFLARRFKLLEQALVIEEQLRRAAYLNMSEDPSHPSMALNTRFAEVECLAESHQHLSKESMAGNKPANAVLHKVLKQLEELLSDMKADVTRLPATIARIPPVAVRLQMSERNILSRLANRAPEPTPQQVAQQQ

SEQ ID NO: 4040 - protein, 1940 aa, Homo sapiens
MASGLGSPSPCSAGSEEEDMDALLNNSLPPPHPENEEDPEEDLSETETPKLKKKKKPKKPRDPKIPKSKRQKKERMLLCRQLGDSSGEGPEFVEEEEEVALRSDSEGSDYTPGKKKKKKLGPKKEKKSKSKRKEEEEEEDDDDDSKEPKSSAQLLEDWGMEDIDHVFSEEDYRTLTNYKAFSQFVRPLIAAKNPKIAVSKMMMVLGAKWREFSTNNPFKGSSGASVAAAAAAAVAVVESMVTATEVAPPPPPVEVPIRKAKTKEGKGPNARRKPKGSPRVPDAKKPKPKKVAPLKIKLGGFGSKRKRSSSEDDDLDVESDFDDASINSYSVSDGSTSRSSRSRKKLRTTKKKKKGEEEVTAVDGYETDHQDYCEVCQQGGEIILCDTCPRAYHMVCLDPDMEKAPEGKWSCPHCEKEGIQWEAKEDNSEGEEILEEVGGDLEEEDDHHMEFCRVCKDGGELLCCDTCPSSYHIHCLNPPLPEIPNGEWLCPRCTCPALKGKVQKILIWKWGQPPSPTPVPRPPDADPNTPSPKPLEGRPERQFFVKWQGMSYWHCSWVSELQLELHCQVMFRNYQRKNDMDEPPSGDFGGDEEKSRKRKNKDPKFAEMEERFYRYGIKPEWMMIHRILNHSVDKKGHVHYLIKWRDLPYDQASWESEDVEIQDYDLFKQSYWNHRELMRGEEGRPGKKLKKVKLRKLERPPETPTVDPTVKYERQPEYLDATGGTLHPYQMEGLNWLRFSWAQGTDTILADEMGLGKTVQTAVFLYSLYKEGHSKGPFLVSAPLSTIINWEREFEMWAPDMYVVTYVGDKDSRAIIRENEFSFEDNAIRGGKKASRMKKEASVKFHVLLTSYELITIDMAILGSIDWACLIVDEAHRLKNNQSKFFRVLNGYSLQHKLLLTGTPLQNNLEELFHLLNFLTPERFHNLEGFLEEFADIAKEDQIKKLHDMLGPHMLRRLKADVFKNMPSKTELIVRVELSPMQKKYYKYILTRNFEALNARGGGNQVSLLNVVMDLKKCCNHPYLFPVAAMEAPKMPNGMYDGSALIRASGKLLLLQKMLKNLKEGGHRVLIFSQMTKMLDLLEDFLEHEGYKYERIDGGITGNMRQEAIDRFNAPGAQQFCFLLSTRAGGLGINLATADTVIIYDSDWNPHNDIQAFSRAHRIGQNKKVMIYRFVTRASVEERITQVAKKKMMLTHLVVRPGLGSKTGSMSKQELDDILKFGTEELFKDEATDGGGDNKEGEDSSVIHYDDKAIERLLDRNQDETEDTELQGMNEYLSSFKVAQYVVREEEMGEEEEVEREIIKQEESVDPDYWEKLLRHHYEQQQEDLARNLGKGKRIRKQVNYNDGSQEDRGVCGRPRPPPMGRSTRAVGPAHLPSLPPDWQDDQSDNQSDYSVASEEGDEDFDERSEAPRRPSRKGLRNDKDKPLPPLLARVGGNIEVLGFNARQRKAFLNAIMRYGMPPQDAFTTQWLVRDLRGKSEKEFKAYVSLFMRHLCEPGADGAETFADGVPREGLSRQHVLTRIGVMSLIRKKVQEFEHVNGRWSMPELAEVEENKKMSQPGSPSPKTPTPSTPGDTQPNTPAPVPPAEDGIKIEENSLKEEESIEGEKEVKSTAPETAIECTQAPAPASEDEKVVVEPPEGEEKVEKAEVKERTEEPMETEPKGAADVEKVEEKSAIDLTPIVVEDKEEKKEEEEKKEVMLQNGETPKDLNDEKQKKNIKQRFMFNIADGGFTELHSLWQNEERAATVTKKTYEIWHRRHDYWLLAGIINHGYARWQDIQNDPRYAILNEPFKGEMNRGNFLEIKNKFLARRFKLLEQALVIEEQLRRAAYLNMSEDPSHPSMALNTRFAEVECLAESHQHLSKESMAGNKPANAVLHKVLKQLEELLSDMKADVTRLPATIARIPPVAVRLQMSERNILSRLANRAPEPTPQQVAQQQ

SEQ ID NO: 4041 - protein, 1147 aa, Homo sapiens
MASGLGSPSPCSAGSEEEDMDALLNNSLPPPHPENEEDPEEDLSETETPKLKKKKKPKKPRDPKIPKSKRQKKELGDSSGEGPEFVEEEEEVALRSDSEGSDYTPGKKKKKKLGPKKEKKSKSKRKEEEEEEDDDDDSKEPKSSAQLLEDWGMEDIDHVFSEEDYRTLTNYKAFSQFVRPLIAAKNPKIAVSKMMMVLGAKWREFSTNNPFKGSSGASVAAAAAAAVAVVESMVTATEVAPPPPPVEVPIRKAKTKEGKGPNARRKPKGSPRVPDAKKPKPKKVAPLKIKLGGFGSKRKRSSSEDDDLDVESDFDDASINSYSVSDGSTSRSSRSRKKLRTTKKKKKGEEEVTAVDGYETDHQDYCEVCQQGGEIILCDTCPRAYHMVCLDPDMEKAPEGKWSCPHCEKEGIQWEAKEDNSEGEEILEEVGGDLEEEDDHHMEFCRVCKDGGELLCCDTCPSSYHIHCLNPPLPEIPNGEWLCPRCTCPALKGKVQKILIWKWGQPPSPTPVPRPPDADPNTPSPKPLEGRPERQFFVKWQGMSYWHCSWVSELQLELHCQVMFRNYQRKNDMDEPPSGDFGGDEEKSRKRKNKDPKFAEMEERFYRYGIKPEWMMIHRILNHSVDKKGHVHYLIKWRDLPYDQASWESEDVEIQDYDLFKQSYWNHRELMRGEEGRPGKKLKKVKLRKLERPPETPTVDPTVKYERQPEYLDATGGTLHPYQMEGLNWLRFSWAQGTDTILADEMGLGKTVQTAVFLYSLYKEGHSKGPFLVSAPLSTIINWEREFEMWAPDMYVVTYVGDKDSRAIIRENEFSFEDNAIRGGKKASRMKKEASVKFHVLLTSYELITIDMAILGSIDWACLIVDEAHRLKNNQSKFFRVLNGYSLQHKLLLTGTPLQNNLEELFHLLNFLTPERFHNLEGFLEEFADIAKEDQIKKLHDMLGPHMLRRLKADVFKNMPSKTELIVRVELSPMQKKYYKYILTRNFEALNARGGGNQVSLLNVVMDLKKCCNHPYLFPVAAMEAPKMPNGMYDGSALIRASGKLLLLQKMLKNLKEGGHRVLIFSQMTKMLDLLEDFLEHEGYKYERIDGGITGNMRQEAIDRFNDFFSSSGWSLTLLPRLECSGAILTHCNLCLLGSSNTPVSAS

SEQ ID NO: 4042 - protein, 1669 aa, Homo sapiens
LGSPSPCSAGSEEEDMDALLNNSLPPPHPENEEDPEEDLSETETPKLKKKKKPKKPRDPKIPKSKRQKKELGDSSGEGPEFVEEEEEVALRSDSEGSDYTPGKKKKKKLGPKKEKKSKSKRKEEEEEEDDDDDSKEPKSSAQLLEDWGMEDIDHVFSEEDYRTLTNYKAFSQFVRPLIAAKNPKIAVSKMMMVLGAKWREFSTNNPFKGSSGASVAAAAAAAVAVVESMVTATEVAPPPPPVEVPIRKAKTKEGKGPNARRKPKGSPRVPDAKKPKPKKVAPLKIKLGGFGSKRKRSSSEDDDLDVESDFDDASINSYSVSDGSTSRSSRSRKKLRTTKKKKKGEEEVTAVDGYETDHQDYCEVCQQGGEIILCDTCPRAYHMVCLDPDMEKAPEGKWSCPHCEKEGIQWEAKEDNSEGEEILEEVGGDLEEEDDHHMEFCRVCKDGGELLCCDTCPSSYHIHCLNPPLPEIPNGEWLCPRCTCPALKGKVQKILIWKWGQPPSPTPVPRPPDADPNTPSPKPLEGRPERQFFVKWQGMSYWHCSWVSELQLELHCQVMFRNYQRKNDMDEPPSGDFGGDEEKSRKRKNKDPKFAEMEERFYRYGIKPEWMMIHRILNHSVDKKGHVHYLIKWRDLPYDQASWESEDVEIQDYDLFKQSYWNHRELMRGEEGRPGKKLKKVKLRKLERPPETPTVDPTVKYERQPEYLDATGGTLHPYQMEGLNWLRFSWAQGTDTILADEMGLGKTVQTAVFLYSLYKEGHSKGPFLVSAPLSTIINWEREFEMWAPDMYVVTYVGDKDSRAIIRENEFSFEDNAIRGGKKASRMKKEASVKFHVLLTSYELITIDMAILGSIDWACLIVDEAHRLKNNQSKFFRVLNGYSLQHKLLLTGTPLQNNLEELFHLLNFLTPERFHNLEGFLEEFADIAKEDQIKKLHDMLGPHMLRRLKADVFKNMPSKTELIVRVELSPMQKKYYKYILTRNFEALNARGGGNQVSLLNVVMDLKKCCNHPYLFPVAAMEAPKMPNGMYDGSALIRASGKLLLLQKMLKNLKEGGHRVLIFSQMTKMLDLLEDFLEHEGYKYERIDGGITGNMRQEAIDRFNAPGAQQFCFLLSTRAGGLGINLATADTVIIYDSDWNPHNDIQAFSRAHRIGQNKKVMIYRFVTRASVEERITQVAKKKMMLTHLVVRPGLGSKTGSMSKQELDDILKFGTEELFKDEATDGGGDNKEGEDSSVIHYDDKAIERLLDRNQDETEDTELQGMNEYLSSFKVAQYVVREEEMGEEEEVEREIIKQEESVDPDYWEKLLRHHYEQQQEDLARNLGKGKRIRKQVNYNDGSQEDRGVCGRPRPPPMGRSTRAVGPAHLPSLPPDWQDDQSDNQSDYSVASEEGDEDFDERSEAPRRPSRKGLRNDKDKPLPPLLARVGGNIEVLGFNARQRKAFLNAIMRYGMPPQDAFTTQWLVRDLRGKSEKEFKAYVSLFMRHLCEPGADGAETFADGVPREGLSRQHVLTRIGVMSLIRKKVQEFEHVNGRWSMPELAEVEENKKMSQPGSPSPKTPTPSTPGDTQPNTPAPVPPAEDGIKIEENSLKEEESIEGEKEVKSTAPETAIECTQAPAPASEDEKVVVEPPEGEEKVEKAEVKERTEEPMETEPKGAADVEKVEEKSAIDL

SEQ ID NO: 4043 - protein, 932 aa, Homo sapiens
VPLRVVNRKRPAREDCRGLTGPLQSLVPSADGDADNCCVQIMGGYFTWTPDGIPTLSNITIRIPRGQLTMIVGQVGCGKSSLLLAALGEMQKVSGAVFWSSSLPDSEIGEDPSPERETATDLDIRKRGPVAYASQKPWLLNATVEENIIFESPFNKQRYKMVIEACSLQPDIDILPHGDQTQIGERGINLSGGQRQRISVARALYQHANVVFLDDPFSALDIHLSDHLMQAGILELLRDDKRTVVLVTHKLQYLPHADWIIAMKDGTIQREGTLKDFQRSECQLFEHWKTLMNRQDQELEKETVTERKATEPPQGLSRAMSSRDGLLQDEEEEEEEAAESEEDDNLSSMLHQRAEIPWRACAKYLSSAGILLLSLLVFSQLLKHMVLVAIDYWLAKWTDSALTLTPAARNCSLSQECTLDQTVYAMVFTVLCSLGIVLCLVTSVTVEWTGLKVAKRLHRSLLNRIILAPMRFFETTPLGSILNRFSSDCNTIDQHIPSTLECLSRSTLLCVSALAVISYVTPVFLVALLPLAIVCYFIQKYFRVASRDLQQLDDTTQLPLLSHFAETVEGLTTIRAFRYEARFQQKLLEYTDSNNIASLFLTAANRWLEVRMEYIGACVVLIAAVTSISNSLHRELSAGLVGLGLTYALMVSNYLNWMVRNLADMELQLGAVKRIHGLLKTEAESYEGLLDQGKIQIQNLSVRYDSSLKPVLKHVNALIAPGQKIGICGRTGSGKSSFSLAFFRMVDTFEGHIIIDGIDIAKLPLHTLRSRLSIILQDPVLFSGTIRFNLDPERKCSDSTLWEALEIAQLKLVVKALPGGLDAIITEGGENFSQGQRQLFCLARAFVRKTSIFIMDEATASIDMATENILQKVVMTAFADRTVVTIAHRVHTILSADLVIVLKRGAILEFDKPEKLLSRKDSVFASFVRADK

SEQ ID NO: 4044 - protein, 524 aa, Homo sapiens
PHVFLLFITFPILFIGWGSQSSKVHIHHSTWLHFPGHNLRWILTFMLLFVLVCEIAEGILSDGVTESHHLHLYMPAGMAFMAAVTSVVYYHNIETSNFPKLLIALLVYWTLAFITKTIKFVKFLDHAIGFSQLRFCLTGLLVILYGMLLLVEVNVIRVRRYIFFKTPREVKPPEDLQDLGVRFLQPFVNLLSKGTYWWMNAFIKTAHKKPIDLRAIGKLPIAMRALTNYQRLCEAFDAQVRKDIQGTQGARAIWQALSHAFGRRLVLSSTFRILADLLGFAGPLCIFGIVDHLGKENDVFQPKTQFLGVYFVSSQEFLANAYVLAVLLFLALLLQRTFLQASYYVAIETGINLRGAIQTKIYNKIMHLSTSNLSMGEMTAGQICNLVAIDTNQLMWFFFLCPNLWAMPVQIIVGVILLYYILGVSALIGAAVIILLAPVQYFVATKLSQAQRSTLEYSNERLKQTNEMLRGIKLLKLYAWENIFRTRVETTRRKEMTSLRAFAIYTSISIFMNTAIPIAAVLIC

SEQ ID NO: 4045 - protein, 422 aa, Homo sapiens
MTVFFKTLRNHWKKTTAGLCLLTWGGHWLYGKHCDNLLRRAACQEAQVFGNQLIPPNAQVKKATVFLNPAACKGKARTLFEKNAAPILHLSGMDVTIVKTDYEGQAKKLLELMENTDVIIVAGGDGTLQEVVTGVLRRTDEATFSKIPIGFIPLGETSSLSHTLFAESGNKVQHITDATLAIVKGETVPLDVLQIKGEKEQPVFAMTGLRWGSFRDAGVKVSKYWYLGPLKIKAAHFFSTLKEWPQTHQASISYTGPTERPPNEPEETPVQRPSLYRRILRRLASYWAQPQDALSQEVSPEVWKDVQLSTIELSITTRNNQLDPTSKEDFLNICIEPDTISKGDFITIGSRKVRNPKLHVEGTECLQASQCTLLIPEGAGGSFSIDSEEYEAMPVEVKLLPRKLQFFCDPRKREQMLTSPTQ

SEQ ID NO: 4046 - protein, 986 aa, Homo sapiens
MSNGYSTDENFRYLISCFRARVKMYIQVEPVLDYLTFLPAEVKEQIQRTVATSGNMQAVELLLSTLEKGVWHLGWTREFVEALRRTGSPLAARYMNPELTDLPSPSFENAHDEYLQLLNLLQPTLVDKLLVRDVLDKCMEEELLTIEDRNRIAAAENNGNESGVRELLKRIVQKENWFSAFLNVLRQTGNNELVQELTGSDCSESNAEIENLSQVDGPQVEEQLLSTTVQPNLEKEVWGMENNSSESSFADSSVVSESDTSLAEGSVSCLDESLGHNSNMGSDSGTMGSDSDEENVAARASPEPELQLRPYQMEVAQPALEGKNIIICLPTGSGKTRVAVYIAKDHLDKKKKASEPGKVIVLVNKVLLVEQLFRKEFQPFLKKWYRVIGLSGDTQLKISFPEVVKSCDIIISTAQILENSLLNLENGEDAGVQLSDFSLIIIDECHHTNKEAVYNNIMRHYLMQKLKNNRLKKENKPVIPLPQILGLTASPGVGGATKQAKAEEHILKDPFKEKLLEIMTRIQTYCQMSPMSDFGTQPYEQWAIQMEKKAAKEGNRKERVCAEHLRKYNEALQINDTIRMIDAYTHLETFYNEEKDKKFAVIEDDSDEGGDDEYCDGDEDEDDLKKPLKLDETDRFLMTLFFENNKMLKRLAENPEYENEKLTKLRNTIMEQYTRTEESARGIIFTKTRQSAYALSQWITENEKFAEVGVKAHHLIGAGHSSEFKPMTQNEQKEVISKFRTGKINLLIATTVAEEGLDIKECNIVIRYGLVTNEIAMVQARGRARADESTYVLVAHSGSGVIEHETVNDFREKMMYKAIHCVQNMKPEEYAHKILELQMQSIMEKKMKTKRNIAKHYKNNPSLITFLCKNCSVLACSGEDIHVIEKMHHVNMTPEFKELYIVRENKALQKKCADYQINGEIICKCGQAWGTMMVHKGLDLPCLKIRNFVVVFKNNSTKKQYKKWVELPITFPNLDYSECCLFSDED

SEQ ID NO: 4047 - protein, 159 aa, Homo sapiens
GAWLLGVPVCGAAELCVNSLEKFHFKSWMSKHRKTYSTEEYHHRLQTFASNWRKINAHNNGNHTFKMALNQFSDMSFAEIKHKYLWSEPQNCSATKSNYLRGTGPYPPSVDWRKKGNFVSPVKNQGACGSCWTFSTTGALESAIAIATGKMLSLPQLSS

SEQ ID NO: 4048 - protein, 4655 aa, Homo sapiens
MDRGPAAVACTLLLALVACLAPASGQECDSAHFRCGSGHCIPADWRCDGTKDCSDDADEIGCAVVTCQQGYFKCQSEGQCIPNSWVCDQDQDCDDGSDERQDCSQSTCSSHQITCSNGQCIPSEYRCDHVRDCPDGADENDCQYPTCEQLTCDNGACYNTSQKCDWKVDCRDSSDEINCTEICLHNEFSCGNGECIPRAYVCDHDNDCQDGSDEHACNYPTCGGYQFTCPSGRCIYQNWVCDGEDDCKDNGDEDGCESGPHDVHKCSPREWSCPESGRCISIYKVCDGILDCPGREDENNTSTGKYCSMTLCSALNCQYQCHETPYGGACFCPPGYIINHNDSRTCVEFDDCQIWGICDQKCESRPGRHLCHCEEGYILERGQYCKANDSFGEASIIFSNGRDLLIGDIHGRSFRILVESQNRGVAVGVAFHYHLQRVFWTDTVQNKVFSVDINGLNIQEVLNVSVETPENLAVDWVNNKIYLVETKVNRIDMVNLDGSYRVTLITENLGHPRGIAVDPTVGYLFFSDWESLSGEPKLERAFMDGSNRKDLVKTKLGWPAGVTLDMISKRVYWVDSRFDYIETVTYDGIQRKTVVHGGSLIPHPFGVSLFEGQVFFTDWTKMAVLKANKFTETNPQVYYQASLRPYGVTVYHSLRQPYATNPCKDNNGGCEQVCVLSHRTDNDGLGFRCKCTFGFQLDTDERHCIAVQNFLIFSSQVAIRGIPFTLSTQEDVMVPVSGNPSFFVGIDFDAQDSTIFFSDMSKHMIFKQKIDGTGREILAANRVENVESLAFDWISKNLYWTDSHYKSISVMRLADKTRRTVVQYLNNPRSVVVHPFAGYLFFTDWFRPAKIMRAWSDGSHLLPVINTTLGWPNGLAIDWAASRLYWVDAYFDKIEHSTFDGLDRRRLGHIEQMTHPFGLAIFGEHLFFTDWRLGAIIRVRKADGGEMTVIRSGIAYILHLKSYDVNIQTGSNACNQPTHPNGDCSHFCFPVPNFQRVCGCPYGMRLASNHLTCEGDPTNEPPTEQCGLFSFPCKNGRCVPNYYLCDGVDDCHDNSDEQLCGTLNNTCSSSAFTCGHGECIPAHWRCDKRNDCVDGSDEHNCPTHAPASCLDTQYTCDNHQCISKNWVCDTDNDCGDGSDEKNCNSTETCQPSQFNCPNHRCIDLSFVCDGDKDCVDGSDEVGCVLNCTASQFKCASGDKCIGVTNRCDGVFDCSDNSDEAGCPTRPPGMCHSDEFQCQEDGICIPNFWECDGHPDCLYGSDEHNACVPKTCPSSYFHCDNGNCIHRAWLCDRDNDCGDMSDEKDCPTQPFRCPSWQWQCLGHNICVNLSVVCDGIFDCPNGTDESPLCNGNSCSDFNGGCTHECVQEPFGAKCLCPLGFLLANDSKTCEDIDECDILGSCSQHCYNMRGSFRCSCDTGYMLESDGRTCKVTASESLLLLVASQNKIIADSVTSQVHNIYSLVENGSYIVAVDFDSISGRIFWSDATQGKTWSAFQNGTDRRVVFDSSIILTETIAIDWVGRNLYWTDYALETIEVSKIDGSHRTVLISKNLTNPRGLALDPRMNEHLLFWSDWGHHPRIERASMDGSMRTVIVQDKIFWPCGLTIDYPNRLLYFMDSYLDYMDFCDYNGHHRRQVIASDLIIRHPYALTLFEDSVYWTDRATRRVMRANKWHGGNQSVVMYNIQWPLGIVAVHPSKQPNSVNPCAFSRCSHLCLLSSQGPHFYSCVCPSGWSLSPDLLNCLRDDQPFLITVRQHIIFGISLNPEVKSNDAMVPIAGIQNGLDVEFDDAEQYIYWVENPGEIHRVKTDGTNRTVFASISMVGPSMNLALDWISRNLYSTNPRTQSIEVLTLHGDIRYRKTLIANDGTALGVGFPIGITVDPARGKLYWSDQGTDSGVPAKIASANMDGTSVKTLFTGNLEHLECVTLDIEEQKLYWAVTGRGVIERGNVDGTDRMILVHQLSHPWGIAVHDSFLYYTDEQYEVIERVDKATGANKIVLRDNVPNLRGLQVYHRRNAAESSNGCSNNMNACQQICLPVPGGLFSCACATGFKLNPDNRSCSPYNSFIVVSMLSAIRGFSLELSDHSETMVPVAGQGRNALHVDVDVSSGFIYWCDFSSSVASDNAIRRIKPDGSSLMNIVTHGIGENGVRGIAVDWVAGNLYFTNAFVSETLIEVLRINTTYRRVLLKVTVDMPRHIVVDPKNRYLFWADYGQRPKIERSFLDCTNRTVLVSEGIVTPRGLAVDRSDGYVYWVDDSLDIIARIRINGENSEVIRYGSRYPTPYGITVFENSIIWVDRNLKKIFQASKEPENTEPPTVIRDNINWLRDVTIFDKQVQPRSPAEVNNNPCLENNGGCSHLCFALPGLHTPKCDCAFGTLQSDGKNCAISTENFLIFALSNSLRSLHLDPENHSPPFQTINVERTVMSLDYDSVSDRIYFTQNLASGVGQISYATLSSGIHTPTVIASGIGTADGIAFDWITRRIYYSDYLNQMINSMAEDGSNRTVIARVPKPRAIVLDPCQGYLYWADWDTHAKIERATLGGNFRVPIVNSSLVMPSGLTLDYEEDLLYWVDASLQRIERSTLTGVDREVIVNAAVHAFGLTLYGQYIYWTDLYTQRIYRANKYDGSGQIAMTTNLLSQPRGINTVVKNQKQQCNNPCEQFNGGCSHICAPGPNGAECQCPHEGNWYLANNRKHCIVDNGERCGASSFTCSNGRCISEEWKCDNDNDCGDGSDEMESVCALHTCSPTAFTCANGRCVQYSYRCDYYNDCGDGSDEAGCLFRDCNATTEFMCNNRRCIPREFICNGVDNCHDNNTSDEKNCPDRTCQSGYTKCHNSNICIPRVYLCDGDNDCGDNSDENPTYCTTHTCSSSEFQCASGRCIPQHWYCDQETDCFDASDEPASCGHSERTCLADEFKCDGGRCIPSEWICDGDNDCGDMSDEDKRHQCQNQNCSDSEFLCVNDRPPDRRCIPQSWVCDGDVDCTDGYDENQNCTRRTCSENEFTCGYGLCIPKIFRCDRHNDCGDYSDERGCLYQTCQQNQFTCQNGRCISKTFVCDEDNDCGDGSDELMHLCHTPEPTCPPHEFKCDNGRCIEMMKLCNHLDDCLDNSDEKGCGINECHDPSISGCDHNCTDTLTSFYCSCRPGYKLMSDKRTCVDIDECTEMPFVCSQKCENVIGSYICKCAPGYLREPDGKTCRQNSNIEPYLIFSNRYYLRNLTIDGYFYSLILEGLDNVVALDFDRVEKRLYWIDTQRQVIERMFLNKTNKETIINHRLPAAESLAVDWVSRKLYWLDARLDGLFVSDLNGGHRRMLAQHCVDANNTFCFDNPRGLALHPQYGYLYWADWGHRAYIGRVGMDGTNKSVIISTKLEWPNGITIDYTNDLLYWADAHLGYIEYSDLEGHHRHTVYDGALPHPFAITIFEDTIYWTDWNTRTVEKGNKYDGSNRQTLVNTTHRPFDIHVYHPYRQPIVSNPCGTNNGGCSHLCLIKPGGKGFTCECPDDFRTLQLSGSTYCMPMCSSTQFLCANNEKCIPIWWKCDGQKDCSDGSDELALCPQRFCRLGQFQCSDGNCTSPQTLCNAHQNCPDGSDEDRLLCENHHCDSNEWQCANKRCIPESWQCDTFNDCEDNSDEDSSHCASRTCRPGQFRCANGRCIPQAWKCDVDNDCGDHSDEPIEECMSSAHLCDNFTEFSCKTNYRCIPKWAVCNGVDDCRDNSDEQGCEERTCHPVGDFRCKNHHCIPLRWQCDGQNDCGDNSDEENCAPRECTESEFRCVNQQCIPSRWICDHYNDCGDNSDERDCEMRTCHPEYFQCTSGHCVHSELKCDGSADCLDASDEADCPTRFPDGAYCQATMFECKNHVCIPPYWKCDGDDDCGDGSDEELHLCLDVPCNSPNRFRCDNNRCIYSHEVCNGVDDCGDGTDETEEHCRKPTPKPCTEYEYKCGNGHCIPHDNVCDDADDCGDWSDELGCNKGKERTCAENICEQNCTQLNEGGFICSCTAGFETNVFDRTSCLDINECEQFGTCPQHCRNTKGSYECVCADGFTSMSDRPGKRCAAEGSSPLLLLPDNVRIRKYNLSSERFSEYLQDEEYIQAVDYDWDPKDIGLSVVYYTVRGEGSRFGAIKRAYIPNFESGRNNLVQEVDLKLKYVMQPDGIAVDWVGRHIYWSDVKNKRIEVAKLDGRYRKWLISTDLDQPAAIAVNPKLGLMFWTDWGKEPKIESAWMNGEDRNILVFEDLGWPTGLSIDYLNNDRIYWSDFKEDVIETIKYDGTDRRVIAKEAMNPYSLDIFEDQLYWISKEKGEVWKQNKFGQGKKEKTLVVNPWLTQVRIFHQLRYNKSVPNLCKQICSHLCLLRPGGYSCACPQGSSFIEGSTTECDAAIELPINLPPPCRCMHGGNCYFDETDLPKCKCPSGYTGKYCEMAFSKGISPGTTAVAVLLTILLIVVIGALAIAGFFHYRRTGSLLPALPKLPSLSSLVKPSENGNGVTFRSGADLNMDIGVSGFGPETAIDRSMAMSEDFVMEMGKQPIIFENPMYSARDSAVKVVQPIQVTVSENVDNKNYGSPINPSEIVPETNPTSPAADGTQVTKWNLFKRKSKQTTNFENPIYAQMENEQKESVAATPPPSPSLPAKPKPPSRRDPTPTYSATEDTFKDTANLVKEDSEV

SEQ ID NO: 4049 - protein, 1864 aa, Homo sapiens
MDRNYATSGFTEPPPPPPPAPPAAPVPASAAAQPPAPAWAYEPRAAAAAASSSCSSGSCSSGSSPSLKASLSYEEGHPSHSETDLLQRQSFAASHQLPGYAPTPQPTGLSGIFDTSVNSASSNTKESSVMNFLSTAESRTAQAAASGTTLLPQFRAPSWQTGMHSSAATELFATGPLPSTGTLPPSLSAYQHPTTFSNRNFATTSPLVLQDSTFNTTSNGILSHHDPLLQIKTSQGTVPTALAFERLGSSVLSNSIPPQSSTYRSAQESAPHLLQPQFSLLPSALGGSQQTPQAYSSTLFTSSTASIERALLRECSVIKHHQRPSGTQSIQAQLTGSQHSLHSYLSNSSVVNFQETTRQSSLSCSPIGDSTQVSNGGLQQKTSQVSVELAQSYSSAIPSSGYPPSTTKIKSCSTEQPLTSTKTPKPQSIIPPVQTLSYSKPLHNQSSVISGQAQIYSTAQLPSLLSVSQSQNYGLVQPHNVPSIVHSQVYRSSKVEKLPPLYKTLTFSGSSQTVTPENQTLNYSSNQQEVLSSVTNENYPAQTRDLSSVSQSQSYSSGHSQGLSPVSQTQVSYSSQSQVLSVVSLSESYASGESLTLTAPSLSYSSASRAQNLPDSSPTQNYISMHSSQNVQTQESSSPQSQKFLPAVQSSSFASSTHCQTLQNNITSPDPKSYAERKLDSDVYPSSKQEDGFPMQELQVLQPQASLESSTQRLSDGEINAQESTYKVSKADDRYSQSVIRSNSRLEDQVIGVALQASKKEESVVGSVTQLNQQIGQVNNAATLDLKNSTNLIQTPQIRLNTKDLKQQHPLILKVHESKVQEQHDQIINASSQIQIPNHALGHGHQASLPNTQVLLDSACDLQILQQSILQAGLGQVKASLQAQRVQSPQQIVHPFLQMEGHVIQSNGDHSQQQLHPQNSEVMKMDLSESSKPLQQHLTTKGHFSETNQHDSKNQFVSLGSMCFPEAVLLSDERNILSNVDDILAATAAACGVTPTDFSKSTSNETMQAVEDGDSKSHFQQSLDVRHVTSDFNSMTATVGKPQNINDTSLNGNQVTVNLSPVPALQSKMTLDQQHIETPGQNIPTKVTSAVVGPSHEVQEQSSGPFKKQSATNLESEEDSEAPVDSTLNNNRNQEFVSSSRSISGENATSESEFTLGGDDSGVSMNPARSALALLAMAQSGDAVSVKIEEENQDLMHFNLQKKRAKGKGQVKEEDNSNQKQLKRPAQGKRQNPRGTDIYLPYTPPSSESCHDGYQHQEKMRQKIKEVEEKQPEVKTGFIASFLDFLKSGPKQQFSTLAVRMPNRTRRPGTQMVRTFCPPPLPKPSSTTPTPLVSETGGNSPSDKVDNELKNLEHLSSFSSDEDDPGYSQDAYKSVSTPLTTLDATSDKKKKTEALQVATTSPTANTTGTATTSSTTVGAVKQEPLHSTSYAVNILENISSSESSKPIELDGLPSDQFAKGQDTVAIEGFTDEEDTESGGEGQYRERDEFVVKIEDIETFKEALKTGKEPPAIWKVQKALLQKFVPEIRDGQREFAATNSYLGYFGDAKSKYKRIYVKFIENANKKEYVRVCSKKPRNKPSQTIRTVQAKPSSSSKTSDPLASKTTTTKAPSVKPKVKQPKVKAEPPPKKRKKWKEEFSSSQSDSSPEIHTSSSDDEEFEPPAPFVTRFLNTRAMKETFKSYMELLVSIALDPDTMQALEKSNDELLLPHMKKIDGMLNDNRKRLLLNLHLDQSFKNALESFPELTIITRDSKAKSGGTAISKIKMNGKAYNKKTLRTSKTTTKSAQEFAVDPEKIQLYSLYHSLHHYKYHVYLICKDEISSVQKKNEDLGQEEIVQLCMKNVKWVEDLFEKFGELLNHVQQKCS

SEQ ID NO: 4050 - protein, 256 aa, Homo sapiens
MEEEGKKGKKPGIVSPFKRVFLKGEKSRDKKAHEKVTERRPLHTVVLSLPERVEPDRLLSDYIEKEVKYLGQLTSIPGYLNPSSRTEILHFIDNAKRAHQLPGHLTQEHDAVLSLSAYNVKLAWRDGEDIILRVPIHDIAAVSYVRDDAAHLVVLKTAQDPGISPSQSLCAESSRGLSAGSLSESAVGPVEACCLVILAAESKVAAEELCCLLGQVFQVVYTESTIDFLDRAIFDGASTPTHHLSLHSDFAVHISP

SEQ ID NO: 4051 - protein, 1366 aa, Homo sapiens
MKSGSGGGSPTSLWGLLFLSAALSLWPTSGEICGPGIDIRNDYQQLKRLENCTVIEGYLHILLISKAEDYRSYRFPKLTVITEYLLLFRVAGLESLGDLFPNLTVIRGWKLFYNYALVIFEMTNLKDIGLYNLRNITRGAIRIEKNADLCYLSTVDWSLILDAVSNNYIVGNKPPKECGDLCPGTMEEKPMCEKTTINNEYNYRCWTTNRCQKMCPSTCGKRACTENNECCHPECLGSCSAPDNDTACVACRHYYYAGVCVPACPPNTYRFEGWRCVDRDFCANILSAESSDSEGFVIHDGECMQECPSGFIRNGSQSMYCIPCEGPCPKVCEEEKKTKTIDSVTSAQMLQGCTIFKGNLLINIRRGNNIASELENFMGLIEVVTGYVKIRHSHALVSLSFLKNLRLILGEEQLEGNYSFYVLDNQNLQQLWDWDHRNLTIKAGKMYFAFNPKLCVSEIYRMEEVTGTKGRQSKGDINTRNNGERASCESDVLHFTSTTTSKNRIIITWHRYRPPDYRDLISFTVYYKEAPFKNVTEYDGQDACGSNSWNMVDVDLPPNKDVEPGILLHGLKPWTQYAVYVKAVTLTMVENDHIRGAKSEILYIRTNASVPSIPLDVLSASNSSSQLIVKWNPPSLPNGNLSYYIVRWQRQPQDGYLYRHNYCSKDKIPIRKYADGTIDIEEVTENPKTEVCGGEKGPCCACPKTEAEKQAEKEEAEYRKVFENFLHNSIFVPRPERKRRDVMQVANTTMSSRSRNTTAADTYNITDPEELETEYPFFESRVDNKERTVISNLRPFTLYRIDIHSCNHEAEKLGCSASNFVFARTMPAEGADDIPGPVTWEPRPENSIFLKWPEPENPNGLILMYEIKYGSQVEDQRECVSRQEYRKYGGAKLNRLNPGNYTARIQATSLSGNGSWTDPVFFYVQAKRYENFIHLIIALPVAVLLIVGGLVIMLYVFHRKRNNSRLGNGVLYASVNPEYFSAADVYVPDEWEVAREKITMSRELGQGSFGMVYEGVAKGVVKDEPETRVAIKTVNEAASMRERIEFLNEASVMKEFNCHHVVRLLGVVSQGQPTLVIMELMTRGDLKSYLRSLRPEMENNPVLAPPSLSKMIQMAGEIADGMAYLNANKFVHRDLAARNCMVAEDFTVKIGDFGMTRDIYETDYYRKGGKGLLPVRWMSPESLKDGVFTTYSDVWSFGVVLWEIATLAEQPYQGLSNEQVLRFVMEGGLLDKPDNCPDMLFELMRMCWQYNPKMRPSFLEIISSIKEEMEPGFREVSFYYSEENKLPEPEELDLEPENMESVPLDPSASSSSLPLPDRHSGHKAENGPGPGVLVLRASFDERQPYAHMNGGRKNERALPLPQSSTC

SEQ ID NO: 4052 - protein, 322 aa, Homo sapiens
MSKTLGSGACGEVKLAFERKTCKKVAIKIISKRKFAIGSAREADPALNVETEIEILKKLNHPCIIKIKNFFDAEDYYIVLELMEGGELFDKVVGNKRLKEATCKLYFYQMLLAVQYLHENGIIHRDLKPENVLLSSQEEDCLIKITDFGHSKILGETSLMRTLCGTPTYLAPEVLVSVGTAGYNRAVDCWSLGVILFICLSGYPPFSEHRTQVSLKDQITSGKYNFIPEVWAEVSEKALDLVKKLLVVDPKARFTTEEALRHPWLQDEDMKRKFQDLLSEENESTALPQVLAQPSTSRKRPREGEAEGAETTKRPAVCAAVL

SEQ ID NO: 4053 - protein, 1153 aa, Homo sapiens
MALRVLLLTALTLCHGFNLDTENAMTFQENARGFGQSVVQLQGSRVVVGAPQEIVAANQRGSLYQCDYSTGSCEPIRLQVPVEAVNMSLGLSLAATTSPPQLLACGPTVHQTCSENTYVKGLCFLFGSNLRQQPQKFPEALRGCPQEDSDIAFLIDGSGSIIPHDFRRMKEFVSTVMEQLKKSKTLFSLMQYSEEFRIHFTFKEFQNNPNPRSLVKPITQLLGRTHTATGIRKVVRELFNITNGARKNAFKILVVITDGEKFGDPLGYEDVIPEADREGVIRYVIGVGDAFRSEKSRQELNTIASKPPRDHVFQVNNFEALKTIQNQLREKIFAIEGTQTGSSSSFEHEMSQEGFSAAITSNGPLLSTVGSYDWAGGVFLYTSKEKSTFINMTRVDSDMNDAYLGYAAAIILRNRVQSLVLGAPRYQHIGLVAMFRQNTGMWESNANVKGTQIGAYFGASLCSVDVDSNGSTDLVLIGAPHYYEQTRGGQVSVCPLPRGQRARWQCDAVLYGEQGQPWGRFGAALTVLGDVNGDKLTDVAIGAPGEEDNRGAVYLFHGTSGSGISPSHSQRIAGSKLSPRLQYFGQSLSGGQDLTMDGLVDLTVGAQGHVLLLRSQPVLRVKAIMEFNPREVARNVFECNDQVVKGKEAGEVRVCLHVQKSTRDRLREGQIQSVVTYDLALDSGRPHSRAVFNETKNSTRRQTQVLGLTQTCETLKLQLPNCIEDPVSPIVLRLNFSLVGTPLSAFGNLRPVLAEDAQRLFTALFPFEKNCGNDNICQDDLSITFSFMSLDCLVVGGPREFNVTVTVRNDGEDSYRTQVTFFFPLDLSYRKVSTLQNQRSQRSWRLACESASSTEVSGALKSTSCSINHPIFPENSEVTFNITFDVDSKASLGNKLLLKANVTSENNMPRTNKTEFQLELPVKYAVYMVVTSHGVSTKYLNFTASENTSRVMQHQYQVSNLGQRSLPISLVFLVPVRLNQTVIWDRPQVTFSENLSSTCHTKERLPSHSDFLAELRKAPVVNCSIAVCQRIQCDIPFFGIQEEFNATLKGNLSFDWYIKTSHNHLLIVSTAEILFNDSVFTLLPGQGAFVRSQTETKVEPFEVPNPLPLIVGSSVGGLLLLALITAALYKLGFFKRQYKDMMSEGGPPGAEPQ

SEQ ID NO: 4054 - protein, 686 aa, Homo sapiens
GTSFGLPQTRRISLASPRQLFKASNMTQRWQHREISNFEYLMFLNTIAGRSYNDLNQYPVFPWVITNYESEELDLTLPTNFRDLSKPIGALNPKRAAFFAERYESWEDDQVPKFHYGTHYSTASFVLAWLLRIEPFTTYFLNLQGGKFDHADRTFSSISRAWRNSQRDTSDIKELIPEFYYLPEMFVNFNNYNLGVMDDGTVVSDVELPPWAKTSEEFVHINRLALESEFVSCQLHQWIDLIFGYKQQGPEAVRALNVFYYLTYEGAVNLNSITDPVLREAVEAQIRSFGQTPSQLLIEPHPPRGSAMQVYLLLQSPLMFTDKAQQDVIMVLKFPSNSPVTHVAANTQPGLATPAVITVTANRLFAVNKWHNLPAHQGAVQDQPYQLPVEIDPLIASNTGMHRRQITDLLDQSIQVHSQCFVITSDNRYILVCGFWDKSFRVYSTDTGRLIQVVFGHWDVVTCLARSESYIGGNCYILSGSRDATLLLWYWNGKCSGIGDNPGSETAAPRAILTGHDYEVTCAAVCAELGLVLSGSQEGPCLIHSMNGDLLRTLEGPENCLKPKLIQASREGHCVIFYENGLFCTFSVNGKLQATMETDDNIRAIQLSRDGQYLLTGGDRGVVVVRQVSDLKQLFAYPGCDAGIRAMALSYDQRRPRSLQKFLSSVISVHHFWHGFRKHCAILQRL

SEQ ID NO: 4055 - protein, 146 aa, Homo sapiens
MTVFFKTLRNHWKKTTAGLCLLTWGGHWLYGKHCDNLLRRAACQEAQVFGNQLIPPNAQVKKATVFLNPAACKGKARTLFEKNAAPILHLSGMDVTIVKTDYEGQAKKLLELMENTDVIIVAGGDGTLQEVVTGVLRRTDEVSIKE

SEQ ID NO: 4056 - protein, 1367 aa, Homo sapiens
MKSGSGGGSPTSLWGLLFLSAALSLWPTSGEICGPGIDIRNDYQQLKRLENCTVIEGYLHILLISKAEDYRSYRFPKLTVITEYLLLFRVAGLESLGDLFPNLTVIRGWKLFYNYALVIFEMTNLKDIGLYNLRNITRGAIRIEKNADLCYLSTVDWSLILDAVSNNYIVGNKPPKECGDLCPGTMEEKPMCEKTTINNEYNYRCWTTNRCQKMCPSTCGKRACTENNECCHPECLGSCSAPDNDTACVACRHYYYAGVCVPACPPNTYRFEGWRCVDRDFCANILSAESSDSEGFVIHDGECMQECPSGFIRNGSQSMYCIPCEGPCPKVCEEEKKTKTIDSVTSAQMLQGCTIFKGNLLINIRRGNNIASELENFMGLIEVVTGYVKIRHSHALVSLSFLKNLRLILGEEQLEGNYSFYVLDNQNLQQLWDWDHRNLTIKAGKMYFAFNPKLCVSEIYRMEEVTGTKGRQSKGDINTRNNGERASCESDVLHFTSTTTSKNRIIITWHRYRPPDYRDLISFTVYYKEAPFKNVTEYDGQDACGSNSWNMVDVDLPPNKDVEPGILLHGLKPWTQYAVYVKAVTLTMVENDHIRGAKSEILYIRTNASVPSIPLDVLSASNSSSQLIVKWNPPSLPNGNLSYYIVRWQRQPQDGYLYRHNYCSKDKIPIRKYADGTIDIEEVTENPKTEVCGGEKGPCCACPKTEAEKQAEKEEAEYRKVFENFLHNSIFVPRPERKRRDVMQVANTTMSSRSRNTTAADTYNITDPEELETEYPFFESRVDNKERTVISNLRPFTLYRIDIHSCNHEAEKLGCSASNFVFARTMPAEGADDIPGPVTWEPRPENSIFLKWPEPENPNGLILMYEIKYGSQVEDQRECVSRQEYRKYGGAKLNRLNPGNYTARIQATSLSGNGSWTDPVFFYVQAKTGYENFIHLIIALPVAVLLIVGGLVIMLYVFHRKRNNSRLGNGVLYASVNPEYFSAADVYVPDEWEVAREKITMSRELGQGSFGMVYEGVAKGVVKDEPETRVAIKTVNEAASMRERIEFLNEASVMKEFNCHHVVRLLGVVSQGQPTLVIMELMTRGDLKSYLRSLRPEMENNPVLAPPSLSKMIQMAGEIADGMAYLNANKFVHRDLAARNCMVAEDFTVKIGDFGMTRDIYETDYYRKGGKGLLPVRWMSPESLKDGVFTTYSDVWSFGVVLWEIATLAEQPYQGLSNEQVLRFVMEGGLLDKPDNCPDMLFELMRMCWQYNPKMRPSFLEIISSIKEEMEPGFREVSFYYSEENKLPEPEELDLEPENMESVPLDPSASSSSLPLPDRHSGHKAENGPGPGVLVLRASFDERQPYAHMNGGRKNERALPLPQSSTC

SEQ ID NO: 4057 - protein, 223 aa, Homo sapiens
MACLGFQRHKAQLNLATRTWPCTLLFFLLFIPVFCKAMHVAQPAVVLASSRGIASFVCEYASPGKATEVRVTVLRQADSQVTEVCAATYMMGNELTFLDDSICTGTSSGNQVNLTIQGLRAMDTGLYICKVELMYPPPYYLGIGNGTQIYVIDPEPCPDSDFLLWILAAVSSGLFFYSFLLTAVSLSKMLKKRSPLTTGVYVKMPPTEPECEKQFQPYFIPIN

SEQ ID NO: 4058 - protein, 780 aa, Homo sapiens
GQKQRVAIARALIRNPKILLLDMATSALDNESEAMVQEVLSKIQHGHTIISVAHRLSTVRAADTIIGFEHGTAVERGTHEELLERKGVYFTLVTLQSQGNQALNEEDIKDATEDDMLARTFSRGSYQDSLRASIRQRSKSQLSYLVHEPPLAVVDHKSTYEEDRKDKDIPVQEEVEPAPVRRILKFSAPEWPYMLVGSVGAAVNGTVTPLYAFLFSQILGTFSIPDKEEQRSQINGVCLLFVAMGCVSLFTQFLQGYAFAKSGELLTKRLRKFGFRAMLGQDIAWFDDLRNSPGALTTRLATDASQVQGAAGSQIGMIVNSFTNVTVAMIIAFSFSWKLSLVILCFFPFLALSGATQTRMLTGFASRDKQALEMVGQITNEALSNIRTVAGIGKERRFIEALETELEKPFKTAIQKANIYGFCFAFAQCIMFIANSASYRYGGYLISNEGLHFSYVFRVISAVVLSATALGRAFSYTPSYAKAKISAARFFQLLDRQPPISVYNTAGEKWDNFQGKIDFVDCKFTYPSRPDSQVLNGLSVSISPGQTLAFVGSSGCGKSTSIQLLERFYDPDQGKVAISSLISVTRNVCLLNSHHPMIDGHDSKKVNVQFLRSNIGIVSQEPVLFACSIMDNIKYGDNTKEIPMERVIAAAKQAQLHDFVMSLPEKYETNVGSQGSQLSRGEKQRIAIARAIVRDPKILLLDEATSALDTESEKTVQVALDKAREGRTCIVIAHRLSTIQNADIIAVMAQGVVIEKGTHEELMAQKGAYYKLVTTGSPIS

SEQ ID NO: 4059 - protein, 526 aa, Homo sapiens
MGSSSSRVLGQPRRALAQQEQGARARGSARRPDTGDDAASYGFCYCPGSHKRKRSSGACRYCDPDSHREEHEEEGDKQQPLLNTPARKKLRSTSKYIYQTLFLNGENSDIKICALGEEWRLHKIYLCQSGYFSSMFSGSWKESSMNIIELEIPDQNIDVDALQVAFGSLYRDDVLIKPSRVVAILAAACMLQLDGLIQQCGETMKETINVKTVCGYYTSVEIYGLDSVKKKCLEWLLNNLMTHQNVKLFKELGINVMKQLIGSSNLFVMQVEMDVYTTLKKWMFLQLVPSWNGSLKQLLTETDVWFSKQRKDFEGMAFLETEPGKPFVSVFRHLRLQYIISDLASARIIEQDGIVPSEWLSSVYKQQWFAMLRAEQDREVGPQEINKEDLEGNSMRCGRKLAKDGEYYWCWTGFNFGFDLLVIYTNGYIIFKRNTLNQPRSGSVSLRPRRSIAFRLRLASFDSSGKLVCSRTTGYQILILKKDQEQVVMNLDSRFLTFPLYICCNFLYISPEKGIENNRHPENPEN

SEQ ID NO: 4060 - protein, 1235 aa, Homo sapiens
MIQGTLEPDGPLWGWDWDSDNDWDSAVLALLALAVVAATALALHWFGSGHDQEAAEPVSTALGAQPHQAGGAELALQPKSKVSDGSEGQSPGQGKPEPPGRGQQSPVPAAAPGGGLAAMARLPLKTAVEEARREALGQQRGSATPAAPRAEGKEPPRPGTALLGRSEAGGMSAPLLIHFTPRSPGSEAEAETGGVRASSRQAAGPAGQQDTGPWQAGAGPSGSMGRGRGRRRRMDAGSGDRARRPRKLDPLRLGAAGSVWDAVDGAAALDAHARGLPTGPPLAQEPALPALPAPRALQPGSQTEGSGAKGGWSREASGVPAPGGGWPWVSREVPGTRSFGPAPDSTRPWLESPPQGRPLSSQGPGATGAYDAGEAGADSSRDNSPAADLGPTRPPEQAKPAAAGHSRAPSRSREPRPRSASPPAAPGPGFPPEALTLPSPSDFLPLEVTQDPSVGENLRAAPAPSSASAQVLTSAPASVLAPALASSPSSAPTSATTSTSSPTSAPAPAPTSAPTSTPAPAPSPAAAATPAPAPVPVPTLTPPSPALTPVPTPALSPAPTPALTPAASPALTPVPTPALSPAPTPAPTPAASPAPAPTSAPTPTPAASPAPADGSKPQESVALPRRYQEGQVSASWGNLIAMVLRSHPFPRQDRPQGSVPRAVPGSPVGPSTSTHSEDRHGPSSSVGTVIGTGTGGLVEAGGQPQPRSSETNGSPSPDPPPGLRGEGTREKSLDPLPQAAMPRGPAQPPAQRPPGPAASSSARRSQPVPQLRKRSRCEIAPSSEQEVRPAASGDPQGEAPGEGGSPAGRSGALTEKQEEARKLMVFLQRPGGWGVVEGPRKPSSRALEPATAAALRRRLDLGSCLDVLAFAQQHGEPGLAQETYALMSDNLLRVLGDPCLYRRLSAADRERILSLRTGRGRAVLGVLVLPSLYQGGRSGLPRGPRGEEPPAAAPVSLPLPAHLHVFNPRENTWRPLTQVPEEAPLRGCGLCTMHNYLFLAGGIRGSGAKAVCSNEVFCYNPLTNIWSQVRPMQQARAQLKLVALDGLLYAIGGECLYSMECYDPRTDAWTPRAPLPAGTFPVAHEAVACRGDIYVTGGHLFYRLLRYSPVKDAWDECPYSASHRRSSDIVALGGFLYRFDLLRGVGAAVMRYNTVTGSWSRAASLPLPAPAPLHCTTLGNTIYCLNPQVTATFTVSGGTAQFQAKELQPFPLGSTGVLSPFILTLPPEDRLQTSL

SEQ ID NO: 4061 - protein, 1025 aa, Homo sapiens
MSNGYSTDENFRYLISCFRARVKMYIQVEPVLDYLTFLPAEVKEQIQRTVATSGNMQAVELLLSTLEKGVWHLGWTREFVEALRRTGSPLAARYMNPELTDLPSPSFENAHDEYLQLLNLLQPTLVDKLLVRDVLDKCMEEELLTIEDRNRIAAAENNGNESGVRELLKRIVQKENWFSAFLNVLRQTGNNELVQELTGSDCSESNAEIENLSQVDGPQVEEQLLSTTVQPNLEKEVWGMENNSSESSFADSSVVSESDTSLAEGSVSCLDESLGHNSNMGSDSGTMGSDSDEENVAARASPEPELQLRPYQMEVAQPALEGKNIIICLPTGSGKTRVAVYIAKDHLDKKKKASEPGKVIVLVNKVLLVEQLFRKEFQPFLKKWYRVIGLSGDTQLKISFPEVVKSCDIIISTAQILENSLLNLENGEDAGVQLSDFSLIIIDECHHTNKEAVYNNIMRHYLMQKLKNNRLKKENKPVIPLPQILGLTASPGVGGATKQAKAEEHILKLCANLDAFTIKTVKENLDQLKNQIQEPCKKFAIADATREDPFKEKLLEIMTRIQTYCQMSPMSDFGTQPYEQWAIQMEKKAAKEGNRKERVCAEHLRKYNEALQINDTIRMIDAYTHLETFYNEEKDKKFAVIEDDSDEGGDDEYCDGDEDEDDLKKPLKLDETDRFLMTLFFENNKMLKRLAENPEYENEKLTKLRNTIMEQYTRTEESARGIIFTKTRQSAYALSQWITENEKFAEVGVKAHHLIGAGHSSEFKPMTQNEQKEVISKFRTGKINLLIATTVAEEGLDIKECNIVIRYGLVTNEIAMVQARGRARADESTYVLVAHSGSGVIEHETVNDFREKMMYKAIHCVQNMKPEEYAHKILELQMQSIMEKKMKTKRNIAKHYKNNPSLITFLCKNCSVLACSGEDIHVIEKMHHVNMTPEFKELYIVRENKALQKKCADYQINGEIICKCGQAWGTMMVHKGLDLPCLKIRNFVVVFKNNSTKKQYKKWVELPITFPNLDYSECCLFSDED

SEQ ID NO: 4062 - protein, 1545 aa, Homo sapiens
MLEKFCNSTFWNSSFLDSPEADLPLCFEQTVLVWIPLGYLWLLAPWQLLHVYKSRTKRSSTTKLYLAKQVFVGFLLILAAIELALVLTEDSGQATVPAVRYTNPSLYLGTWLLVLLIQYSRQWCVQKNSWFLSLFWILSILCGTFQFQTLIRTLLQGDNSNLAYSCLFFISYGFQILILIFSAFSENNESSNNPSSIASFLSSITYSWYDSIILKGYKRPLTLEDVWEVDEEMKTKTLVSKFETHMKRELQKARRALQRRQEKSSQQNSGARLPGLNKNQSQSQDALVLEDVEKKKKKSGTKKDVPKSWLMKALFKTFYMVLLKSFLLKLVNDIFTFVSPQLLKLLISFASDRDTYLWIGYLCAILLFTAALIQSFCLQCYFQLCFKLGVKVRTAIMASVYKKALTLSNLARKEYTVGETVNLMSVDAQKLMDVTNFMHMLWSSVLQIVLSIFFLWRELGPSVLAGVGVMVLVIPINAILSTKSKTIQVKNMKNKDKRLKIMNEILSGIKILKYFAWEPSFRDQVQNLRKKELKNLLAFSQLQCVVIFVFQLTPVLVSVVTFSVYVLVDSNNILDAQKAFTSITLFNILRFPLSMLPMMISSMLQASVSTERLEKYLGGDDLDTSAIRHDCNFDKAMQFSEASFTWEHDSEATVRDVNLDIMAGQLVAVIGPVGSGKSSLISAMLGEMENVHGHITIKGTTAYVPQQSWIQNGTIKDNILFGTEFNEKRYQQVLEACALLPDLEMLPGGDLAEIGEKGINLSGGQKQRISLARATYQNLDIYLLDDPLSAVDAHVGKHIFNKVLGPNGLLKGKTRLLVTHSMHFLPQVDEIVVLGNGTIVEKGSYSALLAKKGEFAKNLKTFLRHTGPEEEATVHDGSEEEDDDYGLISSVEEIPEDAASITMRRENSFRRTLSRSSRSNGRHLKSLRNSLKTRNVNSLKEDEELVKGQKLIKKEFIETGKVKFSIYLEYLQAIGLFSIFFIILAFVMNSVAFIGSNLWLSAWTSDSKIFNSTDYPASQRDMRVGVYGALGLAQGIFVFIAHFWSAFGFVHASNILHKQLLNNILRAPMRFFDTTPTGRIVNRFAGDISTVDDTLPQSLRSWITCFLGIISTLVMICMATPVFTIIVIPLGIIYVSVQMFYVSTSRQLRRLDSVTRSPIYSHFSETVSGLPVIRAFEHQQRFLKHNEVRIDTNQKCVFSWITSNRWLAIRLELVGNLTVFFSALMMVIYRDTLSGDTVGFVLSNALNITQTLNWLVRMTSEIETNIVAVERITEYTKVENEAPWVTDKRPPPDWPSKGKIQFNNYQVRYRPELDLVLRGITCDIGSMEKIGVVGRTGAGKSSLTNCLFRILEAAGGQIIIDGVDIASIGLHDLREKLTIIPQDPILFSGSLRMNLDPFNNYSDEEIWKALELAHLKSFVASLQLGLSHEVTEAGGNLSIGQRQLLCLGRALLRKSKILVLDEATAAVDLETDNLIQTTIQNEFAHCTVITIAHRLHTIMDSDKVMVLDNGKIIECGSPEELLQIPGPFYFMAKEAGIENVNSTKF

SEQ ID NO: 4063 - protein, 456 aa, Homo sapiens
DGPTETLEELVLGLAAEVCDDFLVYCGDTHGSFVVRTLLQVLGGTILESERARPRGSQSSEAQKTPAQECKPADFEVPETFLNRLQDLSSSFLKDIAVFITDKISSFCLQVALQVLHRKLPQFCAHLCNAVIGYLSTRGSSVDGSPLLLFLRDQTSSRLLEQVLLVLEPPRLQSLFEEHLQGQLQTLAAHPIANFPLQRLLDAVTTPELLSPVFEELSPVLEAVLAQGHPGVVIALVGACRRVGAYQAKVLQLLLEAFHCAEPSSRQVACVPLFATLMAYEVYYGLTEEEGAVPAEHQVAMAAARALGDVTVLGSLLLQHLLHFSTPGLVLRSLGALTGPQLLSLAQSPAGSHVLDAILTSPSVTRKLRRRVLQNLKGQYVALACSRHGSRVLDAIWSGAALRARKEIAAELGEQNQELIRDPFGHHVARNVALTTFLKRREAWEQQQVFAVGRLE

SEQ ID NO: 4064 - protein, 58 aa, Homo sapiens
MACLGFQRHKAQLNLATRTWPCTLLFFLLFIPVFCKAKEKKPSYNRGLCENAPNRARM

SEQ ID NO: 4065 - protein, 588 aa, Homo sapiens
MECLYYFLGFLLLAARLPLDAAKRFHDVLGNERPSAYMREHNQLNGWSSDENDWNEKLYPVWKRGDMRWKNSWKGGRVQAVLTSDSPALVGSNITFAVNLIFPRCQKEDANGNIVYEKNCRNEAGLSADPYVYNWTAWSEDSDGENGTGQSHHNVFPDGKPFPHHPGWRRWNFIYVFHTLGQYFQKLGRCSVRVSVNTANVTLGPQLMEVTVYRRHGRAYVPIAQVKDVYVVTDQIPVFVTMFQKNDRNSSDETFLKDLPIMFDVLIHDPSHFLNYSTINYKWSFGDNTGLFVSTNHTVNHTYVLNGTFSLNLTVKAAAPGPCPPPPPPPRPSKPTPSLGTWMKLETIILSKLSQGQKTKRRMFSFTGPAGDNPLELSRIPDENCQINRYGHFQATITIVEGILEVNIIQMTDVLMPVPWPESSLIDFVVTCQGSIPTEVCTIISDPTCEITQNTVCSPVDVDEMCLLTVRRTFNGSGTYCVNLTLGDDTSLALTSTLISVPDRDPASPLRMANSALISVGCLAIFVTVISLLVYKKHKEYNPIENSPGNVVRSKGLSVFLNRAKAVFFPGNQEKDPLLKNQEFKGVS

SEQ ID NO: 4066 - protein, 397 aa, Homo sapiens
MPPKRNEKYKLPIPFPEGKVLDDMEGNQWVLGKKIGSGGFGLIYLAFPTNKPEKDARHVVKVEYQENGPLFSELKFYQRVAKKDCIKKWIERKQLDYLGIPLFYGSGLTEFKGRSYRFMVMERLGIDLQKISGQNGTFKKSTVLQLGIRMLDVLEYIHENEYVHGDIKAANLLLGYKNPDQVYLADYGLSYRYCPNGNHKQYQENPRKGHNGTIEFTSLDAHKGVALSRRSDVEILGYCMLRWLCGKLPWEQNLKDPVAVQTAKTNLLDELPQSVLKWAPSGSSCCEIAQFLVCAHSLAYDEKPNYQALKKILNPHGIPLGPLDFSTKGQSINVHTPNSQKVDSQKAATKQVNKAHNRLIEKKVHSERSAESCATWKVQKEEKLIGLMNNEAAQVEA

SEQ ID NO: 4067 - protein, 350 aa, Homo sapiens
MTVFFKTLRNHWKKTTAGLCLLTWGGHWLYGKHCDNLLRRAACQEAQVFGNQLIPPNAQVKKATVFLNPAACKGKARTLFEKNAAPILHLSGMDVTIVKTDYEGQAKKLLELMENTDVIIVAGGDGTLQEVVTGVLRRTDEATFSKIPIGFIPLGETSSLSHTLFAESGNKVQHITDATLAIVKGETVPLDVLQIKGEKEQPVFAMTGLRWGSFRDAGVKVSKYWYLGPLKIKAAHFFSTLKEWPQTHQASISYTGPTERPPNEPEETPVQRPSLYRRILRRLASYWAQPQDALSQEVSPEVWKDVQLSTIELSITTRNNQLDPTSKEDFLNICIEPDTISKGDFITIGK

SEQ ID NO: 4068 - protein, 72 aa, Homo sapiens
MNGVLIPHTPIAVDFWSLRRAGTARLFFLSHMHSDHTVGLSSTWARPLYCSPITAHLLHRHLQVIFDTHHPC

SEQ ID NO: 4069 - protein, 38 aa, Homo sapiens
GYEINKVRAKRSSKMYLKTRSQMPYKGLKFPQIRPTPS

SEQ ID NO: 4070 - protein, 1360 aa, Homo sapiens
NQFTCQNGRCISKTFVCDEDNDCGDGSDELMHLCHTPEPTCPPHEFKCDNGRCIEMMKLCNHLDDCLDNSDEKGCGINECHDPSISGCDHNCTDTLTSFYCSCRPGYKLMSDKRTCVDIDECTEMPFVCSQKCENVIGSYICKCAPGYLREPDGKTCRQNSNIEPYLIFSNRYYLRNLTIDGYFYSLILEGLDNVVALDFDRVEKRLYWIDTQRQVIERMFLNKTNKETIINHRLPAAESLAVDWVSRKLYWLDARLDGLFVSDLNGGHRRMLAQHCVDANNTFCFDNPRGLALHPQYGYLYWADWGHRAYIGRVGMDGTNKSVIISTKLEWPNGITIDYTNDLLYWADAHLGYIEYSDLEGHHRHTVYDGALPHPFAITIFEDTIYWTDWNTRTVEKGNKYDGSNRQTLVNTTHRPFDIHVYHPYRQPIVSNPCGTNNGGCSHLCLIKPGGKGFTCECPDDFRTLQLSGSTYCMPMCSSTQFLCANNEKCIPIWWKCDGQKDCSDGSDELALCPQRFCRLGQFQCSDGNCTSPQTLCNAHQNCPDGSDEDRLLCENHHCDSNEWQCANKRCIPESWQCDTFNDCEDNSDEDSSHCASRTCRPGQFRCANGRCIPQAWKCDVDNDCGDHSDEPIEECMSSAHLCDNFTEFSCKTNYRCIPKWAVCNGVDDCRDNSDEQGCEERTCHPVGDFRCKNHHCIPLRWQCDGQNDCGDNSDEENCAPRECTESEFRCVNQQCIPSRWICDHYNDCGDNSDERDCEMRTCHPEYFQCTSGHCVHSELKCDGSADCLDASDEADCPTRFPDGAYCQATMFECKNHVCIPPYWKCDGDDDCGDGSDEELHLCLDVPCNSPNRFRCDNNRCIYSHEVCNGVDDCGDGTDETEEHCRKPTPKPCTEYEYKCGNGHCIPHDNVCDDADDCGDWSDELGCNKGKERTCAENICEQNCTQLNEGGFICSCTAGFETNVFDRTSCLDINECEQFGTCPQHCRNTKGSYECVCADGFTSMSDRPGKRCAAEGSSPLLLLPDNVRIRKYNLSSERFSEYLQDEEYIQAVDYDWDPKDIGLSVVYYTVRGEGSRFGAIKRAYIPNFESGRNNLVQEVDLKLKYVMQPDGIAVDWVGRHIYWSDVKNKRIEVAKLDGRYRKWLISTDLDQPAAIAVNPKLGLMFWTDWGKEPKIESAWMNGEDRNILVFEDLGWPTGLSIDYLNNDRIYWSDFKEDVIETIKYDGTDRRVIAKEAMNPYSLDIFEDQLYWISKEKGEVWKQNKFGQGKKEKTLVVNPWLTQVRIFHQLRYNKSVPNLCKQICSHLCLLRPGGYSCACPQGSSFIEGSTTECDAGVLAATPENIVKWRFQKASLQEQPQ

SEQ ID NO: 4071 - protein, 475 aa, Homo sapiens
MESKALLVLTLAVWLQSLTASRGGVAAADQRRDFIDIESKFALRTPEDTAEDTCHLIPGVAESVATCHFNHSSKTFMVIHGWTVTGMYESWVPKLVAALYKREPDSNVIVVDWLSRAQEHYPVSAGYTKLVGQDVARFINWMEEEFNYPLDNVHLLGYSLGAHAAGIAGSLTNKKVNRITGLDPAGPNFEYAEAPSRLSPDDADFVDVLHTFTRGSPGRSIGIQKPVGHVDIYPNGGTFQPGCNIGEAIRVIAERGLGDVDQLVKCSHERSIHLFIDSLLNEENPSKAYRCSSKEAFEKGLCLSCRKNRCNNLGYEINKVRAKRSSKMYLKTRSQMPYKVFHYQVKIHFSGTESETHTNQAFEISLYGTVAESENIPFTLPEVSTNKTYSFLIYTEVDIGELLMLKLKWKSDSYFSWSDWWSSPGFAIQKIRVKAGETQKKVIFCSREKVSHLQKGKAPAVFVKCHDKSLNKKSG

SEQ ID NO: 4072 - protein, 330 aa, Homo sapiens
MDVTIVKTDYEGQAKKLLELMENTDVIIVAGGDGTLQEVVTGVLRRTDEATFSKIPIGFIPLGETSSLSHTLFAESGNKVQHITDATLAIVKGETVPLDVLQIKGEKEQPVFAMTGLRWGSFRDAGVKVSKYWYLGPLKIKAAHFFSTLKEWPQTHQASISYTGPTERPPNEPEETPVQRPSLYRRILRRLASYWAQPQDALSQEVSPEVWKDVQLSTIELSITTRNNQLDPTSKEDFLNICIEPDTISKGDFITIGSRKVRNPKLHVEGTECLQASQCTLLIPEGAGGSFSIDSEEYEAMPVEVKLLPRKLQFFCDPRKREQMLTSPTQ

SEQ ID NO: 4073 - protein, 774 aa, Homo sapiens
MSGGHQLQLAALWPWLLMATLQAGFGRTGLVLAAAVESERSAEQKAIIRVIPLKMDPTGKLNLTLEGVFAGVAEITPAEGKLMQSHPLYLCNASDDDNLEPGFISIVKLESPRRAPRPCLSLASKARMAGERGASAVLFDITEDRAAAEQLQQPLGLTWPVVLIWGNDAEKLMEFVYKNQKAHVRIELKEPPAWPDYDVWILMTVVGTIFVIILASVLRIRCRPRHSRPDPLQQRTAWAISQLATRRYQASCRQARGEWPDSGSSCSSAPVCAICLEEFSEGQELRVISCLHEFHRNCVDPWLHQHRTCPLCMFNITEGDSFSQSLGPSRSYQEPGRRLHLIRQHPGHAHYHLPAAYLLGPSRSAVARPPRPGPFLPSQEPGMGPRHHRFPRAAHPRAPGEQQRLAGAQHPYAQGWGLSHLQSTSQHPAACPVPLRRARPPDSSGSGESYCTERSGYLADGPASDSSSGPCHGSSSDSVVNCTDISLQGVHGSSSTFCSSLSSDFDPLVYCSPKGDPQRVDMQPSVTSRPRSLDSVVPTGETQVSSHVHYHRHRHHHYKKRFQWHGRKPGPETGVPQSRPPIPRTQPQPEPPSPDQQVTRSNSAAPSGRLSNPQCPRALPEPAPGPVDASSICPSTSSLFNLQKSSLSARHPQRKRRGGPSEPTPGSRPQDATVHPACQIFPHYTPSVAYPWSPEAHPLICGPPGLDKRLLPETPGPCYSNSQPVWLCLTPRQPLEPHPPGEGPSEWSSDTAEGRPCPYPHCQVLSAQPDYRPV

SEQ ID NO: 4074 - protein, 176 aa, Homo sapiens
MSRESDVEAQQSHGSSACSQPHGSVTQSQGSSSQSQGISSSSTSTMPNSSQSSHSSSGTLSSLETVSTQELYSIPEDQEPEDQEPEEPTPAPWARLWALQDGFANLECVNDNYWFGRDKSCEYCFDEPLLKRTDKYRTYSKKHFRIFREVGPKNSYIAYIEDHSGNGTFVNTELVG

SEQ ID NO: 4075 - protein, 241 aa, Homo sapiens
MAVFLQLLPLLLSRAQGNPGASLDGRPGDRVNLSCGGVSHPIRWVWAPSFPACKGLSKGRRPILWASSSGTPTVPPLQPFVGRLRSLDSGIRRLELLLSAGDSGTFFCKGRHEDESRTVLHVLGDRTYCKAPGPTHGSVYPQLLIPLLGAGLVLGLGALGLVWWLHRRLPPQPIRPLPRFAPLVKTEPQRPVKEEEPKIPGDLDQEPSLLYADLDHLALSRPRRLSTADPADASTIYAVVV

SEQ ID NO: 4076 - protein, 313 aa, Homo sapiens
DRVRTDAYRLGILRNWAALRGKTVLDVGAGTGILSIFCAQAGARRVYAVEASAIWQQAREVVRFNGLEDRVHVLPGPVETVELPEQVDAIVSEWMGYGLLHESMLSSVLHARTKWLKEGGLLLPASAELFIAPISDQMLEWRLGFWSQVKQHYGVDMSCLEGFATRCLMGHSEIVVQGLSGEDVLARPQRFAQLELSRAGLEQELEAGVGGRFRCSCYGSAPMHGFAIWFQVTFPGGESEKPLVLSTSPFHPATHWKQALLYLNEPVQVEQDTDVSGEITLLPSRDNPRRLRVLLRYKVGDQEEKTKDFAMED

SEQ ID NO: 4077 - protein, 1177 aa, Homo sapiens
MVWRLVLLALWVWPSTQAGHQDKDTTFDLFSISNINRKTIGAKQFRGPDPGVPAYRFVRFDYIPPVNADDLSKITKIMRQKEGFFLTAQLKQDGKSRGTLLALEGPGLSQRQFEIVSNGPADTLDLTYWIDGTRHVVSLEDVGLADSQWKNVTVQVAGETYSLHVGCDLIDSFALDEPFYEHLQAEKSRMYVAKGSARESHFRGLLQNVHLVFENSVEDILSKKGCQQGQGAEINAISENTETLRLGPHVTTEYVGPSSERRPEVCERSCEELGNMVQELSGLHVLVNQLSENLKRVSNDNQFLWELIGGPPKTRNMSACWQDGRFFAENETWVVDSCTTCTCKKFKTICHQITCPPATCASPSFVEGECCPSCLHSVDGEEGWSPWAEWTQCSVTCGSGTQQRGRSCDVTSNTCLGPSIQTRACSLSKCDTRSECRAVRQDGGWSHWSPWSSCSVTCGVGNITRIRLCNSPVPQMGGKNCKGSGRETKACQGAPCPIDGRWSPWSPWSACTVTCAGGIRERTRVCNSPEPQYGGKACVGDVQERQMCNKRSCPVDGCLSNPCFPGAQCSSFPDGSWSCGSCPVGFLGNGTHCEDLDECALVPDICFSTSKVPRCVNTQPGFHCLPCPPRYRGNQPVGVGLEAAKTEKQVCEPENPCKDKTHNCHKHAECIYLGHFSDPMYKCECQTGYAGDGLICGEDSDLDGWPNLNLVCATNATYHCIKDNCPHLPNSGQEDFDKDGIGDACDDDDDNDGVTDEKDNCQLLFNPRQADYDKDEVGDRCDNCPYVHNPAQIDTDNNGEGDACSVDIDGDDVFNERDNCPYVYNTDQRDTDGDGVGDHCDNCPLVHNPDQTDVDNDLVGDQCDNNEDIDDDGHQNNQDNCPYISNANQADHDRDGQGDACDPDDDNDGVPDDRDNCRLVFNPDQEDLDGDGRGDICKDDFDNDNIPDIDDVCPENNAISETDFRNFQMVPLDPKGTTQIDPNWVIRHQGKELVQTANSDPGIAVGFDEFGSVDFSGTFYVNTDRDDDYAGFVFGYQSSSRFYVVMWKQVTQTYWEDQPTRAYGYSGVSLKVVNSTTGTGEHLRNALWHTGNTPGQVRTLWHDPRNIGWKDYTAYRWHLTHRPKTGYIRVLVHEGKQVMADSGPIYDQTYAGGRLGLFVFSQEMVYFSDLKYECRDI

SEQ ID NO: 4078 - protein, 418 aa, Homo sapiens
MPPSLANFCIFSRDGVSPCWSGWSRTPDLVIHSPWPPKVLQLQVFGNQLIPPNAQVKKATVFLNPAACKGKARTLFEKNAAPILHLSGMDVTIVKTDYEGQAKKLLELMENTDVIIVAGGDGTLQEVVTGVLRRTDEATFSKIPIGFIPLGETSSLSHTLFAESGNKVQHITDATLAIVKGETVPLDVLQIKGEKEQPVFAMTGLRWGSFRDAGVKVSKYWYLGPLKIKAAHFFSTLKEWPQTHQASISYTGPTERPPNEPEETPVQRPSLYRRILRRLASYWAQPQDALSQEVSPEVWKDVQLSTIELSITTRNNQLDPTSKEDFLNICIEPDTISKGDFITIGSRKVRNPKLHVEGTECLQASQCTLLIPEGAGGSFSIDSEEYEAMPVEVKLLPRKLQFFCDPRKREQMLTSPTQ

SEQ ID NO: 4079 - protein, 471 aa, Homo sapiens
MNGVLIPHTPIAVDFWSLRRAGTARLFFLSHMHSDHTVGLSSTWARPLYCSPITAHLLHRHLQVSKQWIQALEVGESHVLPLDEIGQETMTVTLLDANHCPGSVMFLFEGYFGTILYTGLYSLGKESLLEQLALEFQTWVVLSPRRLELVQLLGLADVFTVEEKAGRIHAVDHMEICHSNMLRWNQTHPTIAILPTSRKIHSSHPDIHVIPYSDHSSYSELRAFVAALKPCQVVPIVSRRPCGGFQDSLSPRISVPLIPDSVQQYMSSSSRKPSLLWLLERRLKRPRTQGVVFESPEESADQSQADRDSKKAKKEKLSPWPADLEKQPSHHPLRIKKQLFPDLYSKEWNKAVPFCESQKRVTMLTAPLGFSVHLRSTDEEFISQKTREEIGLGSPLVPMGDDDGGPEATGNQSAWMGHGSPLSHSSKGTPLLATEFRGLALKYLLTPVNFFQAGYSSRRFDQQVEKYHKPC

SEQ ID NO: 4080 - protein, 1251 aa, Homo sapiens
MSTERDSETTFDEDSQPNDEVVPYSDDETEDELDDQGSAVEPEQNRVNREAEENREPFRKECTWQVKANDRKYHEQPHFMNTKFLCIKESKYANNAIKTYKYNAFTFIPMNLFEQFKRAANLYFLALLILQAVPQISTLAWYTTLVPLLVVLGVTAIKDLVDDVARHKMDKEINNRTCEVIKDGRFKVAKWKEIQVGDVIRLKKNDFVPADILLLSSSEPNSLCYVETAELDGETNLKFKMSLEITDQYLQREDTLATFDGFIECEEPNNRLDKFTGTLFWRNTSFPLDADKILLRGCVIRNTDFCHGLVIFAGADTKIMKNSGKTRFKRTKIDYLMNYMVYTIFVVLILLSAGLAIGHAYWEAQVGNSSWYLYDGEDDTPSYRGFLIFWGYIIVLNTMVPISLYVSVEVIRLGQSHFINWDLQMYYAEKDTPAKARTTTLNEQLGQIHYIFSDKTGTLTQNIMTFKKCCINGQIYGDHRDASQHNHNKIEQVDFSWNTYADGKLAFYDHYLIEQIQSGKEPEVRQFFFLLAVCHTVMVDRTDGQLNYQAASPDEGALVNAARNFGFAFLARTQNTITISELGTERTYNVLAILDFNSDRKRMSIIVRTPEGNIKLYCKGADTVIYERLHRMNPTKQETQDALDIFANETLRTLCLCYKEIEEKEFTEWNKKFMAASVASTNRDEALDKVYEEIEKDLILLGATAIEDKLQDGVPETISKLAKADIKIWVLTGDKKETAENIGFACELLTEDTTICYGEDINSLLHARMENQRNRGGVYAKFAPPVQESFFPPGGNRALIITGSWLNEILLEKKTKRNKILKLKFPRTEEERRMRTQSKRRLEAKKEQRQKNFVDLACECSAVICCRVTPKQKAMVVDLVKRYKKAITLAIGDGANDVNMIKTAHIGVGISGQEGMQAVMSSDYSFAQFRYLQRLLLVHGRWSYIRMCKFLRYFFYKNFAFTLVHFWYSFFNGYSAQTAYEDWFITLYNVLYTSLPVLLMGLLDQDVSDKLSLRFPGLYIVGQRDLLFNYKRFFVSLLHGVLTSMILFFIPLGAYLQTVGQDGEAPSDYQSFAVTIASALVITVNFQIGLDTSYWTFVNAFSIFGSIALYFGIMFDFHSAGIHVLFPSAFQFTGTASNALRQPYIWLTIILAVAVCLLPVVAIRFLSMTIWPSESDKIQKHRKRLKAEEQWQRRQQVFRRGVSTRRSAYAFSHQRGYADLISSGRSIRKKRSPLDAIVADGTAEYRRTGDS

SEQ ID NO: 4081 - protein, 1321 aa, Homo sapiens
MSDSVILRSIKKFGEENDGFESDKSYNNDKKSRLQDEKKGDGVRVGFFQLFRFSSSTDIWLMFVGSLCAFLHGIAQPGVLLIFGTMTDVFIDYDVELQELQIPGKACVNNTIVWTNSSLNQNMTNGTRCGLLNIESEMIKFASYYAGIAVAVLITGYIQICFWVIAAARQIQKMRKFYFRRIMRMEIGWFDCNSVGELNTRFSDDINKINDAIADQMALFIQRMTSTICGFLLGFFRGWKLTLVIISVSPLIGIGAATIGLSVSKFTDYELKAYAKAGVVADEVISSMRTVAAFGGEKREVERYEKNLVFAQRWGIRKGIVMGFFTGFVWCLIFLCYALAFWYGSTLVLDEGEYTPGTLVQIFLSVIVGALNLGNASPCLEAFATGRAAATSIFETIDRKPIIDCMSEDGYKLDRIKGEIEFHNVTFHYPSRPEVKILNDLNMVIKPGEMTALVGPSGAGKSTALQLIQRFYDPCEGMVTVDGHDIRSLNIQWLRDQIGIVEQEPVLFSTTIAENIRYGREDATMEDIVQAAKEANAYNFIMDLPQQFDTLVGEGGGQMSGGQKQRVAIARALIRNPKILLLDMATSALDNESEAMVQEVLSKIQHGHTIISVAHRLSTVRAADTIIGFEHGTAVERGTHEELLERKGVYFTLVTLQSQGNQALNEEDIKDATEDDMLARTFSRGSYQDSLRASIRQRSKSQLSYLVHEPPLAVVDHKSTYEEDRKDKDIPVQEEVEPAPVRRILKFSAPEWPYMLVGSVGAAVNGTVTPLYAFLFSQILGTFSIPDKEEQRSQINGVCLLFVAMGCVSLFTQFLQGYAFAKSGELLTKRLRKFGFRAMLGQDIAWFDDLRNSPGALTTRLATDASQVQGAAGSQIGMIVNSFTNVTVAMIIAFSFSWKLSLVILCFFPFLALSGATQTRMLTGFASRDKQALEMVGQITNEALSNIRTVAGIGKERRFIEALETELEKPFKTAIQKANIYGFCFAFAQCIMFIANSASYRYGGYLISNEGLHFSYVFRVISAVVLSATALGRAFSYTPSYAKAKISAARFFQLLDRQPPISVYNTAGEKWDNFQGKIDFVDCKFTYPSRPDSQVLNGLSVSISPGQTLAFVGSSGCGKSTSIQLLERFYDPDQGKVMIDGHDSKKVNVQFLRSNIGIVSQEPVLFACSIMDNIKYGDNTKEIPMERVIAAAKQAQLHDFVMSLPEKYETNVGSQGSQLSRGEKQRIAIARAIVRDPKILLLDEATSALDTESEKTVQVALDKAREGRTCIVIAHRLSTIQNADIIAVMAQGVVIEKGTHEELMAQKGAYYKLVTTGSPIS

SEQ ID NO: 4082 - protein, 138 aa, Homo sapiens
MDVTIVKTDYEGQAKKLLELMENTDVIIVAGGDGTLQEVVTGVLRRTDEATFSKIPIGFIPLGETSSLSHTLFAESGNKVQHITDATLAIVKGETVPLDVLQIKGEKEQPVFAMTGLRWGSFRDAGVKVSKYWYLGPL

SEQ ID NO: 4083 - protein, 177 aa, Homo sapiens
MPRLLRLSLLWLGLLLVRFSRELSDISSARKLCGRYLVKEIEKLCGHANWSQFRFEEETPFSRLIAQASEKVEAYSPYQFESPQTASPARGRGTNPVSTSWEEAVNSWEMQSLPEYKDKKGYSPLGLLEFAGGPLQMLFAWVSPAEAAEQQRLLPVPSSGSFIPEGHPLDASQSFPV

SEQ ID NO: 4084 - protein, 214 aa, Homo sapiens
MTVFFKTLRNHWKKTTAGLCLLTWGGHWLYGKHCDNLLRRAACQEAQVFGNQLIPPNAQVKKATVFLNPAACKGKARTLFEKNAAPILHLSGMDVTIVKTDYEGQAKKLLELMENTDVIIVAGGDGTLQEVVTGVLRRTDEATFSKIPIGFIPLGETSSLSHTLFAESGNKVQHITDATLAIVKGETVPLDVLQIKVLVSWASKNQSSPLFQHS

SEQ ID NO: 4085 - protein, 973 aa, Homo sapiens
MEVTCLLLLALIPFHCRGQGVYAPAQAQIVHAGQACVVKEDNISERVYTIREGDTLMLQCLVTGHPRPQVRWTKTAGSASDKFQETSVFNETLRIERIARTQGGRYYCKAENGVGVPAIKSIRVDVQYLDEPMLTVHQTVSDVRGNFYQEKTVFLRCTVNSNPPARFIWKRGSDTLSHSQDNGVDIYEPLYTQGETKVLKLKNLRPQDYASYTCQVSVRNVCGIPDKAITFRLTNTTAPPALKLSVNETLVVNPGENVTVQCLLTGGDPLPQLQWSHGPGPLPLGALAQGGTLSIPSVQARDSGYYNCTATNNVGNPAKKTVNLLVRSMKNATFQITPDVIKESENIQLGQDLKLSCHVDAVPQEKVTYQWFKNGKPARMSKRLLVTRNDPELPAVTSSLELIDLHFSDYGTYLCMASFPGAPVPDLSVEVNISSETVPPTISVPKGRAVVTVREGSPAELQCEVRGKPRPPVLWSRVDKEAALLPSGLPLEETPDGKLRLERVSRDMSGTYRCQTARYNGFNVRPREAQVQLNVQFPPEVEPSSQDVRQALGRPVLLRCSLLRGSPQRIASAVWRFKGQLLPPPPVVPAAAEAPDHAELRLDAVTRDSSGSYECSVSNDVGSAACLFQVSAKAYSPEFYFDTPNPTRSHKLSKNYSYVLQWTQREPDAVDPVLNYRLSIRQLNQHNAVVKAIPVRRVEKGQLLEYILTDLRVPHSYEVRLTPYTTFGAGDMASRIIHYTEPINSPNLSDNTCHFEDEKICGYTQDLTDNFDWTRQNALTQNPKRSPNTGPPTDISGTPEGYYMFIETSRPRELGDRARLVSPLYNASAKFYCVSFFYHMYGKHIGSLNLLVRSRNKGALDTHAWSLSGNKGNVWQQAHVPISPSGPFQIIFEGVRGPGYLGDIAIDDVTLKKGECPRKQTDPNKGILLCGLDSEDLHPGLLPVNLCAFVHSANTNQTLPLWKPLFNGRDGQM

SEQ ID NO: 4086 - protein, 532 aa, Homo sapiens
MNGVLIPHTPIAVDFWSLRRAGTARLFFLSHMHSDHTVGLSSTWARPLYCSPITAHLLHRHLQVSKQWIQALEVGESHVLPLDEIGQETMTVTLLDANHCPGSVMFLFEGYFGTILYTGDFRYTPSMLKEPALTLGKQIHTLYLDNTNCNPALVLPSRQEAAHQIVQLIRKHPQHNIKIGLYSLGKESLLEQLALEFQTWVVLSPRRLELVQLLGLADVFTVEEKAGRIHAVDHMEICHSNMLRWNQTHPTIAILPTSRKIHSSHPDIHVIPYSDHSSYSELRAFVAALKPCQVVPIVSRRPCGGFQDSLSPRISVPLIPDSVQQYMSSSSRKPSLLWLLERRLKRPRTQGVVFESPEESADQSQADRDSKKAKKEKLSPWPADLEKQPSHHPLRIKKQLFPDLYSKEWNKAVPFCESQKRVTMLTAPLGFSVHLRSTDEEFISQKTREEIGLGSPLVPMGDDDGGPEATGNQSAWMGHGSPLSHSSKGTPLLATEFRGLALKYLLTPVNFFQAGYSSRRFDQQVEKYHKPC

SEQ ID NO: 4087 - protein, 925 aa, Homo sapiens
MERDGCAGGGSRGGEGGRAPREGPAGNGRDRGRSHAAEAPGDPQAAASLLAPMDVGEEPLEKAARARTAKDPNTYKVLSLVLSVCVLTTILGCIFGLKPSCAKEVKSCKGRCFERTFGNCRCDAACVELGNCCLDYQETCIEPEHIWTCNKFRCGEKRLTRSLCACSDDCKDKGDCCINYSSVCQGEKSWVEEPCESINEPQCPAGFETPPTLLFSLDGFRAEYLHTWGGLLPVISKLKKCGTYTKNMRPVYPTKTFPNHYSIVTGLYPESHGIIDNKMYDPKMNASFSLKSKEKFNPEWYKGEPIWVTAKYQGLKSGTFFWPGSDVEINGIFPDIYKMYNGSVPFEERILAVLQWLQLPKDERPHFYTLYLEEPDSSGHSYGPVSSEVIKALQRVDGMVGMLMDGLKELNLHRCLNLILISDHGMEQGSCKKYIYLNKYLGDVKNIKVIYGPAARLRPSDVPDKYYSFNYEGIARNLSCREPNQHFKPYLKHFLPKRLHFAKSDRIEPLTFYLDPQWQLALNPSERKYCGSGFHGSDNVFSNMQALFVGYGPGFKHGIEADTFENIEVYNLMCDLLNLTPAPNNGTHGSLNHLLKNPVYTPKHPKEVHPLVQCPFTRNPRDNLGCSCNPSILPIEDFQTQFNLTVAEEKIIKHETLPYGRPRVLQKENTICLLSQHQFMSGYSQDILMPLWTSYTVDRNDSFSTEDFSNCLYQDFRIPLSPVHKCSFYKNNTKVSYGFLSPPQLNKNSSGIYSEALLTTNIVPMYQSFQVIWRYFHDTLLRKYAEERNGVNVVSGPVFDFDYDGRCDSLENLRQKRRVIRNQEILIPTHFFIVLTSCKDTSQTPLHCENLDTLAFILPHRTDNSESCVHGKHDSSWVEELLMLHRARITDVEHITGLSFYQQRKEPVSDILKLKTHLPTFSQED

SEQ ID NO: 4088 - protein, 134 aa, Homo sapiens
MDVTIVKTDYEGQAKKLLELMENTDVIIVAGGDGTLQEVVTGVLRRTDEATFSKIPIGFIPLGETSSLSHTLFAESGNKVQHITDATLAIVKGETVPLDVLQIKTFILHPMDQGIISTFKFYYLINKLWTKGHQ

SEQ ID NO: 4089 - protein, 662 aa, Homo sapiens
VLTSYRSTAERKLLPLLKPPKPTRVRQDATIFGDPPQPDLDLLSEDGIQTGAGPGGVDLWAVRGQERGRGELKPSKLQSPTGTGLFASPPAAALVLKRVAVFIVTIPAGAGVGSPGWGSWSFFFSSLWLLSPGDSPDEAPQNTPPATVEGREEEGLEVLKEQNWELPLQDEPLYQTYRAAVLSEELWGVGEDGSPSPANAGDAPTFPRPPGPRNTLWQELPAVQASGLLDTLSPQERRMQESLFEVVTSEASYLRSLRLLTDTFVLSQALRDTLTPRDHHTLFSNVQRVQGVSERFLATLLSRVRSSPHISDLCDVVHAHAVGPFSVYVDYVRNQQYQEETYSRLMDTNVRFSAELRRLQSLPKCERLPLPSFLLLPFQRITRLRMLLQNILRQTEEGSSRQENAQKALGAVSKIIERCSAEVGRMKQTEELIRLTQRLRFHKVKALPLVSWSRRLEFQGELTELGCRRGGVLFASRPRFTPLCLLLFSDLLLITQPKSGQRLQVLDYAHRSLVQAQQVPDPSGPPTFRLSLLSNHQGRPTHRLLQASSLSDMQRWLGAFPTPGPLPCSPDTIYEDCDCSQELCSESSAPAKTEGRSLESRAAPKHLHKTPEGWLKGLPGAFPAQLVCEVTGEHERRRHLRQNQRLLEAVGSSSGTPNAPPP

SEQ ID NO: 4090 - protein, 385 aa, Homo sapiens
MGCRRTREGPSKAMIFPWKCQSTQRDLWNIFKLWGWTMLCCDFLAHHGTDCWTYHYSEKPMNWQRARRFCRDNYTDLVAIQNKAEIEYLEKTLPFSRSYYWIGIRKIGGIWTWVGTNKSLTEEAENWGDGEPNNKKNKEDCVEIYIKRNKDAGKWNDDACHKLKAALCYTASCQPWSCSGHGECVEIINNYTCNCDVGYYGPQCQFVIQCEPLEAPELGTMDCTHPLGNFSFSSQCAFSCSEGTNLTGIEETTCGPFGNWSSPEPTCQVIQCEPLSAPDLGIMNCSHPLASFSFTSACTFICSEGTELIGKKKTICESSGIWSNPSPICQKLDKSFSMIKEGDYNPLFIPVAVMVTAFSGLAFIIWLARRLKKGKKSKRSMNDPY

SEQ ID NO: 4091 - protein, 2095 aa, Homo sapiens
GLFSLLAERLMLQTNLITMTTYNVLFEILIEQIGTQVIHKQHPDPDSSVKIQNPQILKVIATLLRNSPQCPESMEVRRAFLSDMIKLFNNSRENRRSLLQCSVWQEWMLSLCYFNPKNSDEQKITEMVYAIFRILLYHAVKYEWGGWRVWVDTLSITHSKVTFEIHKENLANIFREQQGKVDEEIGLCSSTSVQAASGIRRDINVSVGSQQPDTKDSPVCPHFTTNGNENSSIEKTSSLESASNIELQTTNTSYEEMKAEQENQELPDEGTLEETLTNETRNADDLEVSSDIIEAVAISSNSFITTGKDSMTVSEVTASISSPSEEDASEMPEFLDKSIVEEEEDDDYVELKVEGSPTEEANLPTELQDNSLSPAASEAGEKLDMFGNDDKLIFQEGKPVTEKQTDTETQDSKDSGIQTMTASGSSAMSPETTVSQIAVESDLGQMLEEGKKATNLTRETKLINDCHGSVSEASSEQKIAKLDVSNVATDTERLELKASPNVEAPQPHRHVLEISRQHEQPGQGIAPDAVNGQRRDSRSTVFRIPEFNWSQMHQRLLTDLLFSIETDIQMWRSHSTKTVMDFVNSSDNVIFVHNTIHLISQVMDNMVMACGGILPLLSAATSATHELENIEPTQGLSIEASVTFLQRLISLVDVLIFASSLGFTEIEAEKSMSSGGILRQCLRLVCAVAVRNCLECQQHSQLKTRGDKALKPMHSLIPLGKSAAKSPVDIVTGGISPVRDLDRLLQDMDINRLRAVVFRDIEDSKQAQFLALAVVYFISVLMVSKYRDILEPQNERHSQSCTETGSENENVSLSEITPAAFSTLTTASVEESESTSSARRRDSGIGEETATGLGSHVEVTPHTAPPGVSAGPDAISEVLSTLSLEVNKSPETKNDRGNDLDTKATPSVSVSKNVNVKDILRSLVNIPADGVTVDPALLPPACLGALGDLSVEQPVQFRSFDRSVIVAAKKSAVSPSTFNTSIPTNAVSVVSSVDSAQASDMGGESPGSRSSNAKLPSVPTVDSVSQDPVSNMSITERLEHALEKAAPLLREIFVDFAPFLSRTLLGSHGQELLIEGTSLVCMKSSSSVVELVMLLCSQEWQNSIQKNAGLAFIELVNEGRLLSQTMKDHLVRVANEAEFILSRQRAEDIHRHAEFESLCAQYSADKREDEKMCDHLIRAAKYRDHVTATQLIQKIINILTDKHGAWGNSAVSRPLEFWRLDYWEDDLRRRRRFVRNPLGSTHPEATLKTAVEHATDEDILAKGKQSIRSQALGNQNSENEILLEGDDDTLSSVDEKDLENLAGPVSLSTPAQLVAPSVVVKGTLSVTSSELYFEVDEEDPNFKKIDPKILAYTEGLHGKWLFTEIRSIFSRRYLLQNTALEIFMANRVAVMFNFPDPATVKKVVNYLPRVGVGTSFGLPQTRRISLASPRQLFKASNMTQRWQHREISNFEYLMFLNTIAGRSYNDLNQYPVFPWVITNYESEELDLTLPTNFRDLSKPIGALNPKRAAFFAERYESWEDDQVPKFHYGTHYSTASFVLAWLLRIEPFTTYFLNLQGGKFDHADRTFSSISRAWRNSQRDTSDIKELIPEFYYLPEMFVNFNNYNLGVMDDGTVVSDVELPPWAKTSEEFVHINRLALESEFVSCQLHQWIDLIFGYKQQGPEAVRALNVFYYLTYEGAVNLNSITDPVLREAVEAQIRSFGQTPSQLLIEPHPPRGSAMQVYLLLQSPLMFTDKAQQDVIMVLKFPSNSPVTHVAANTQPGLATPAVITVTANRLFAVNKWHNLPAHQGAVQDQPYQLPVEIDPLIASNTGMHRRQITDLLDQSIQVHSQCFVITSDNRYILVCGFWDKSFRVYSTDTGRLIQVVFGHWDVVTCLARSESYIGGNCYILSGSRDATLLLWYWNGKCSGIGDNPGSETAAPRAILTGHDYEVTCAAVCAELGLVLSGSQEGPCLIHSMNGDLLRTLEGPENCLKPKLIQASREGHCVIFYENGLFCTFSVNGKLQATMETDDNIRAIQLSRDGQYLLTGGDRGVVVVRQVSDLKQLFAYPGCDAGIRAMALSYDQRCIISGMASGSIVLFYNDFNRWHHEYQTRY

SEQ ID NO: 4092 - protein, 379 aa, Homo sapiens
MFPPSGSTGLIPPSHFQARPLSTLPRMAPTWLSDIPLVQPPGHQDVSERRLDTQRPQVTMWERDVSSDRQEPGRRGRSWGLEGSQALSQQAEVIVRQLQELRRLEEEVRLLRETSLQQKMRLEAQAMELEALARAEKAGRAEAEGLRAALAGAEVVRKNLEEGSQRELEEVQRLHQEQLSSLTQAHEEALSSLTSKAEGLEKSLSSLETRRAGEAKELAEAQREAELLRKQLSKTQEDLEAQVTLVENLRKYVGEQVPSEVHSQTWELERQKLLETMQHLQEDRDSLHATAELLQVRVQSLTHILALQEEELTRKVQPSDSLEPEFTRKCQSLLNRWREKVFALMVQLKAQELEHSDSVKQLKGQRQAFTMLVRLILNP

SEQ ID NO: 4093 - protein, 650 aa, Homo sapiens
MGPASPAARGLSRRPGQPPLPLLLPLLLLLLRAQPAIGSLAGGSPGAAEAPGSAQVAGLCGRLTLHRDLRTGRWEPDPQRSRRCLRDPQRVLEYCRQMYPELQIARVEQATQAIPMERWCGGSRSGSCAHPHHQVVPFRCLPGEFVSEALLVPEGCRFLHQERMDQCESSTRRHQEAQEACSSQGLILHGSGMLLPCGSDRFRGVEYVCCPPPGTPDPSGTAVGDPSTRSWPPGSRVEGAEDEEEEESFPQPVDDYFVEPPQAEEEEETVPPPSSHTLAVVGKVTPTPRPTDGVDIYFGMPGEISEHEGFLRAKMDLEERRMRQINEVMREWAMADNQSKNLPKADRQALNEHFQSILQTLEEQVSGERQRLVETHATRVIALINDQRRAALEGFLAALQADPPQAERVLLALRRYLRAEQKEQRHTLRHYQHVAAVDPEKAQQMRFQVHTHLQVIEERVNQSLGLLDQNPHLAQELRPQIQELLHSEHLGPSELEAPAPGGSSEDKGGLQPPDSKDDTPMTLPKGSTEQDAASPEKEKMNPLEQYERKVNASVPRGFPFHSSEIQRDELAPAGTGVSREAVSGLLIMGAGGGSLIVLSMLLLRRKKPYGAISHGVVEVDPMLTLEEQQLRELQRHGYENPTYRFLEERP

SEQ ID NO: 4094 - protein, 2347 aa, Homo sapiens
MRILKRFLACIQLLCVCRLDWANGYYRQQRKLVEEIGWSYTGALNQKNWGKKYPTCNSPKQSPINIDEDLTQVNVNLKKLKFQGWDKTSLENTFIHNTGKTVEINLTNDYRVSGGVSEMVFKASKITFHWGKCNMSSDGSEHSLEGQKFPLEMQIYCFDADRFSSFEEAVKGKGKLRALSILFEVGTEENLDFKAIIDGVESVSRFGKQAALDPFILLNLLPNSTDKYYIYNGSLTSPPCTDTVDWIVFKDTVSISESQLAVFCEVLTMQQSGYVMLMDYLQNNFREQQYKFSRQVFSSYTGKEEIHEAVCSSEPENVQADPENYTSLLVTWERPRVVYDTMIEKFAVLYQQLDGEDQTKHEFLTDGYQDLGAILNNLLPNMSYVLQIVAICTNGLYGKYSDQLIVDMPTDNPELDLFPELIGTEEIIKEEEEGKDIEEGAIVNPGRDSATNQIRKKEPQISTTTHYNRIGTKYNEAKTNRSPTRGSEFSGKGDVPNTSLNSTSQPVTKLATEKDISLTSQTVTELPPHTVEGTSASLNDGSKTVLRSPHMNLSGTAESLNTVSITEYEEESLLTSFKLDTGAEDSSGSSPATSAIPFISENISQGYIFSSENPETITYDVLIPESARNASEDSTSSGSEESLKDPSMEGNVWFPSSTDITAQPDVGSGRESFLQTNYTEIRVDESEKTTKSFSAGPVMSQGPSVTDLEMPHYSTFAYFPTEVTPHAFTPSSRQQDLVSTVNVVYSQTTQPVYNGETPLQPSYSSEVFPLVTPLLLDNQILNTTPAASSSDSALHATPVFPSVDVSFESILSSYDGAPLLPFSSASFSSELFRHLHTVSQILPQVTSATESDKVPLHASLPVAGGDLLLEPSLAQYSDVLSTTHAASETLEFGSESGVLYKTLMFSQVEPPSSDAMMHARSSGPEPSYALSDNEGSQHIFTVSYSSAIPVHDSVGVTYQGSLFSGPSHIPIPKSSLITPTASLLQPTHALSGDGEWSGASSDSEFLLPDTDGLTALNISSPVSVAEFTYTTSVFGDDNKALSKSEIIYGNETELQIPSFNEMVYPSESTVMPNMYDNVNKLNASLQETSVSISSTKGMFPGSLAHTTTKVFDHEISQVPENNFSVQPTHTVSQASGDTSLKPVLSANSEPASSDPASSEMLSPSTQLLFYETSASFSTEVLLQPSFQASDVDTLLKTVLPAVPSDPILVETPKVDKISSTMLHLIVSNSASSENMLHSTSVPVFDVSPTSHMHSASLQGLTISYASEKYEPVLLKSESSHQVVPSLYSNDELFQTANLEINQAHPPKGRHVFATPVLSIDEPLNTLINKLIHSDEILTSTKSSVTGKVFAGIPTVASDTFVSTDHSVPIGNGHVAITAVSPHRDGSVTSTKLLFPSKATSELSHSAKSDAGLVGGGEDGDTDDDGDDDDDDRGSDGLSIHKCMSCSSYRESQEKVMNDSDTHENSLMDQNNPISYSLSENSEEDNRVTSVSSDSQTGMDRSPGKSPSANGLSQKHNDGKEENDIQTGSALLPLSPESKAWAVLTSDEESGSGQGTSDSLNENETSTDFSFADTNEKDADGILAAGDSEITPGFPQSPTSSVTSENSEVFHVSEAEASNSSHESRIGLAEGLESEKKAVIPLVIVSALTFICLVVLVGILIYWRKCFQTAHFYLEDSTSPRVISTPPTPIFPISDDVGAIPIKHFPKHVADLHASSGFTEEFEEVQSCTVDLGITADSSNHPDNKHKNRYINIVAYDHSRVKLAQLAEKDGKLTDYINANYVDGYNRPKAYIAAQGPLKSTAEDFWRMIWEHNVEVIVMITNLVEKGRRKCDQYWPADGSEEYGNFLVTQKSVQVLAYYTVRNFTLRNTKIKKGSQKGRPSGRVVTQYHYTQWPDMGVPEYSLPVLTFVRKAAYAKRHAVGPVVVHCSAGVGRTGTYIVLDSMLQQIQHEGTVNIFGFLKHIRSQRNYLVQTEEQYVFIHDTLVEAILSKETEVLDSHIHAYVNALLIPGPAGKTKLEKQFQGLTLSPRLECRGTISAHCNLPLPGLTDPPTSASRVARTILLSQSNIQQSDYSAALKQCNREKNRTSSIIPVERSRVGISSLSGEGTDYINASYIMGYYQSNEFIITQHPLLHTIKDFWRMIWDHNAQLVVMIPDGQNMAEDEFVYWPNKDEPINCESFKVTLMAEEHKCLSNEEKLIIQDFILEATQDDYVLEVRHFQCPKWPNPDSPISKTFELISVIKEEAANRDGPMIVHDEHGGVTAGTFCALTTLMHQLEKENSVDVYQVAKMINLMRPGVFADIEQYQFLYKVILSLVSTRQEENPSTSLDSNGAALPDGNIAESLESLV

SEQ ID NO: 4095 - protein, 1827 aa, Homo sapiens
KTFKKVKPCGICRQVITQEGCTCKVCSFSCHRKCQAKVAAPCVPPSNHELVPITTENAPKNVVDKGEGASRGGNTRKSLEDNGSTRVTPSVQPHLQPIRNMSVSRTMEDSCELDLVYVTERIIAVSFPSTANEENFRSNLREVAQMLKSKHGGNYLLFNLSERRPDITKLHAKVLEFGWPDLHTPALEKICSICKAMDTWLNADPHNVVVLHNKGNRGRIGVVIAAYMHYSNISASADQALDRFAMKRFYEDKIVPIGQPSQRRYVHYFSGLLSGSIKMNNKPLFLHHVIMHGIPNFESKGGCRPFLRIYQAMQPVYTSGIYNIPGDSQTSVCITIEPGLLLKGDILLKCYHKKFRSPARDVIFRVQFHTCAIHDLGVVFGKEDLDDAFKDDRFPEYGKVEFVFSYGPEKIQGMEHLENGPSVSVDYNTSDPLIRWDSYDNFSGHRDDGMEEVVGHTQGPLDGSLYAKVKKKDSLHGSTGAVNATRPTLSATPNHVEHTLSVSSDSGNSTASTKTDKTDEPVPGASSATAALSPQEKRELDRLLSGFGLEREKQGAMYHTQHLRSRPAGGSAVPSSGRHVVPAQVHVNGGALASERETDILDDELPNQDGHSAGSMGTLSSLDGVTNTSEGGYPEALSPLTNGLDKSYPMEPMVNGGGYPYESASRAGPAHAGHTAPMRPSYSAQEGLAGYQREGPHPAWPQPVTTSHYAHDPSGMFRSQSFSEAEPQLPPAPVRGGSSREAVQRGLNSWQQQQQQQQQPRPPPRQQERAHLESLVASRPSPQPLAETPIPSLPEFPRAASQQEIEQSIETLNMLMLDLEPASAAAPLHKSQSVPGAWPGASPLSSQPLSGSSRQSHPLTQSRSGYIPSGHSLGTPEPAPRASLESVPPGRSYSPYDYQPCLAGPNQDFHSKSPASSSLPAFLPTTHSPPGPQQPPASLPGLTAQPLLSPKEATSDPSRTPEEEPLNLEGLVAHRVAGVQAREKQPAEPPAPLRRRAASDGQYENQSPEATSPRSPGVRSPVQCVSPELALTIALNPGGRPKEPHLHSYKEAFEEMEGTSPSSPPPSGVRSPPGLAKTPLSALGLKPHNPADILLHPTGEEDEGKVVVRLSEEPRSYVESVARTAVAGPRAQDSEPKSFSAPATQAYGHEIPLRNGTLGGSFVSPSPLSTSSPILSADSTSVGSFPSGESSDQGPRTPTQPLLESGFRSGSLGQPSPSAQRNYQSSSPLPTVGSSYSSPDYSLQHFSSSPESQARAQFSVAGVHTVPGSPQARHRTVGTNTPPSPGFGWRAINPSMAAPSSPSLSHHQMMGPPGTGFHGSTVSSPQSSAATTPGSPSLCRHPAGVYQVSGLHNKVATTPGSPSLGRHPGAHQGNLASGLHSNAIASPGSPSLGRHLGGSGSVVPGSPCLDRHVAYGGYSTPEDRRPTLSRQSSASGYQAPSTPSFPVSPAYYPGLSSPATSPSPDSAAFRQGSPTPALPEKRRMSVGDRAGSLPNYATINGKVSSPVASGMSSPSGGSTVSFSHTLPDFSKYSMPDNSPETRAKVKFVQDTSKYWYKPEISREQAIALLKDQEPGAFIIRDSHSFRGAYGLAMKVSSPPPTIMQQNKKGDMTHELVRHFLIETGPRGVKLKGCPNEPNFGSLSALVYQHSIIPLALPCKLVIPNRDPTDESKDSSGPANSTADLLKQGAACNVLFVNSVDMESLTGPQAISKATSETLAADPTPAATIVHFKVSAQGITLTDNQRKLFFRRHYPLNTVTFCDLDPQERKWMKTEGGAPAKLFGFVARKQGSTTDNACHLFAELDPNQPASAIVNFVSKVMLNAGQKR

SEQ ID NO: 4096 - protein, 578 aa, Homo sapiens
MCSEARLARRAVEELLRCGADPNLVLEDGAAAVHLAAGARHPRGLRCLGALLRQGGDPNARSVEALTPLHVAAAWGCRRGLELLLSQGADPALRDQDGLRPLDLALQQGHLECARVLQDLDTRTRTRTRIGAETQEPEPAPGTPGLSGPTDETLDSIALQKQPCRGDNRDIGLEADPGPPSLPVPLETVDKHGSSASPPGHWDYSSDASFVTAVEVSGAEDPASDTPPWAGSLPPTRQGLLHVVHANQRVPRSQGTEAELNARLQALTLTPPNAAGFQSSPSSMPLLDRSPAHSPPRTPTPGASDCHCLWEHQTSIDSDMATLWLTEDEASSTGGREPVGPCRHLPVSTVSDLELLKGLRALGPEFSGHSLELAAALRTGCIPDVQADEDALAQQFEQPDPARRWREGVVKSSFTYLLLDPRETQDLPARAFSLTPAERLQTFIRAIFYVGKGTRARPYVHLWEALGHHGRSRKQPHQACPKVRQILDIWASGCGVVSLHCFQHVVAVEAYTREACIVEALGIQTLTNQKQGHCYGVVAGWPPARRRRLGVHLLHRALLVFLAEGERQLHPQDIQARG

SEQ ID NO: 4097 - protein, 405 aa, Homo sapiens
MNSAHCNFRLPGSSDSPASASREAGITEAGITVAAGFVLRQCGSDGQWGLWRDHTQCENPEKNEAFLDQRLILERLQVMYTVGYSLSLATLLLALLILSLFRRLHCTRNYIHINLFTSFMLRAAAILSRDRLLPRPGPYLGDQALALWNQALAACRTAQIVTQYCVGANYTWLLVEGVYLHSLLVLVGGSEEGHFRYYLLLGWGAPALFVIPWVIVRYLYENTQCWERNEVKAIWWIIRTPILMTILINFLIFIRILGILLSKLRTRQMRCRDYRLRLARSTLTLVPLLGVHEVVFAPVTEEQARGALRFAKLGFEIFLSSFQGFLVSVLYCFINKEVQSEIRRGWHHCRLRRSLGEEQRQLPERAFRALPSGSGPGEVPTSRGLSSGTLPGPGNEASRELESYC

SEQ ID NO: 4098 - protein, 1004 aa, Homo sapiens
MTTRKLSAHSAATPGYKAVTHKHHTGWARMAKTGLPEKGQSQAGGESGSGQLLDQENGAGESALVSVYVHLDFPDKTWPPELSRTLTLPAASASSSPRPLLTGLRLTTECNVNHKGNFYCACLSGYQWNTSICLHYPPCQSLHNHQPCGCLVFSHPEPGYCQLLPPVPGILNLNSQLQMPGDTLSLTLHLSQEATNLSWFLRHPGSPSPILLQPGTQVSVTSSHGQAALSVSNMSHHWAGEYMSCFEAQGFKWNLYEVVRVPLKATDVARLPYQLSISCATSPGFQLSCCIPSTNLAYTAAWSPGEGSKASSFNESGSQCFVLAVQRCPMADTTYACDLQSLGLAPLRVPISITIIQDGDITCPEDASVLTWNVTKAGHVAQAPCPESKRGIVRRLCGADGVWGPVHSSCTDARLLALFTRTKLLQAGQGSPAEEVPQILAQLPGQAAEASSPSDLLTLLSTMKYVAKVVAEARIQLDRRALKNLLIATDKVLDMDTRSLWTLAQARKPWAGSTLLLAVETLACSLCPQDHPFAFSLPNVLLQSQLFGPTFPADYSISFPTRPPLQAQIPRHSLAPLVRNGTEISITSLVLRKLDHLLPSNYGQGLGDSLYATPGLVLVISIMAGDRAFSQGEVIMDFGNTDGSPHCVFWDHSLFQGRGGWSKEGCQAQVASASPTAQCLCQHLTAFSVLMSPHTVPEEPALALLTQVGLGASILALLVCLGVYWLVWRVVVRNKISYFRHAALLNMVFCLLAADTCFLGAPFLSPGPRSPLCLAAAFLCHFLYLATFFWMLAQALVLAHQLLFVFHQLAKHRVLPLMVLLGYLCPLGLAGVTLGLYLPQGQYLREGECWLDGKGGALYTFVGPVLAIIGVNGLVLAMAMLKLLRPSLSEGPPAEKRQALLGVIKALLILTPIFGLTWGLGLATLLEEVSTVPHYIFTILNTLQGVFILLFGCLMDRKIQEALRKRFCRAQAPSSTISLATNEGCILEHSKGGSDTARKTDASE

SEQ ID NO: 4099 - protein, 2354 aa, Homo sapiens
MRILKRFLACIQLLCVCRLDWANGYYRQQRKLVEEIGWSYTGALNQKNWGKKYPTCNSPKQSPINIDEDLTQVNVNLKKLKFQGWDKTSLENTFIHNTGKTVEINLTNDYRVSGGVSEMVFKASKITFHWGKCNMSSDGSEHSLEGQKFPLEMQIYCFDADRFSSFEEAVKGKGKLRALSILFEVGTEENLDFKAIIDGVESVSRFGKQAALDPFILLNLLPNSTDKYYIYNGSLTSPPCTDTVDWIVFKDTVSISESQLAVFCEVLTMQQSGYVMLMDYLQNNFREQQYKFSRQVFSSYTGKEEIHEAVCSSEPENVQADPENYTSLLVTWERPRVVYDTMIEKFAVLYQQLDGEDQTKHEFLTDGYQDLGAILNNLLPNMSYVLQIVAICTNGLYGKYSDQLIVDMPTDNPELDLFPELIGTEEIIKEEEEGKDIEEGAIVNPGRDSATNQIRKKEPQISTTTHYNRIGTKYNEAKTNRSPTRGSEFSGKGDVPNTSLNSTSQPVTKLATEKDISLTSQTVTELPPHTVEGTSASLNDGSKTVLRSPHMNLSGTAESLNTVSITEYEEESLLTSFKLDTGAEDSSGSSPATSAIPFISENISQGYIFSSENPETITYDVLIPESARNASEDSTSSGSEESLKDPSMEGNVWFPSSTDITAQPDVGSGRESFLQTNYTEIRVDESEKTTKSFSAGPVMSQGPSVTDLEMPHYSTFAYFPTEVTPHAFTPSSRQQDLVSTVNVVYSQTTQPVYNGETPLQPSYSSEVFPLVTPLLLDNQILNTTPAASSSDSALHATPVFPSVDVSFESILSSYDGAPLLPFSSASFSSELFRHLHTVSQILPQVTSATESDKVPLHASLPVAGGDLLLEPSLAQYSDVLSTTHAASETLEFGSESGVLYKTLMFSQVEPPSSDAMMHARSSGPEPSYALSDNEGSQHIFTVSYSSAIPVHDSVGVTYQGSLFSGPSHIPIPKSSLITPTASLLQPTHALSGDGEWSGASSDSEFLLPDTDGLTALNISSPVSVAEFTYTTSVFGDDNKALSKSEIIYGNETELQIPSFNEMVYPSESTVMPNMYDNVNKLNASLQETSVSISSTKGMFPGSLAHTTTKVFDHEISQVPENNFSVQPTHTVSQASGDTSLKPVLSANSEPASSDPASSEMLSPSTQLLFYETSASFSTEVLLQPSFQASDVDTLLKTVLPAVPSDPILVETPKVDKISSTMLHLIVSNSASSENMLHSTSVPVFDVSPTSHMHSASLQGLTISYASEKYEPVLLKSESSHQVVPSLYSNDELFQTANLEINQAHPPKGRHVFATPVLSIDEPLNTLINKLIHSDEILTSTKSSVTGKVFAGIPTVASDTFVSTDHSVPIGNGHVAITAVSPHRDGSVTSTKLLFPSKATSELSHSAKSDAGLVGGGEDGDTDDDGDDDDDDRGSDGLSIHKCMSCSSYRESQEKVMNDSDTHENSLMDQNNPISYSLSENSEEDNRVTSVSSDSQTGMDRSPGKSPSANGLSQKHNDGKEENDIQTGSALLPLSPESKAWAVLTSDEESGSGQGTSDSLNENETSTDFSFADTNEKDADGILAAGDSEITPGFPQSPTSSVTSENSEVFHVSEAEASNSSHESRIGLAEGLESEKKAVIPLVIVSALTFICLVVLVGILIYWRKCFQTAHFYLEDSTSPRVISTPPTPIFPISDDVGAIPIKHFPKHVADLHASSGFTEEFETLKEFYQEVQSCTVDLGITADSSNHPDNKHKNRYINIVAYDHSRVKLAQLAEKDGKLTDYINANYVDGYNRPKAYIAAQGPLKSTAEDFWRMIWEHNVEVIVMITNLVEKGRRKCDQYWPADGSEEYGNFLVTQKSVQVLAYYTVRNFTLRNTKIKKGSQKGRPSGRVVTQYHYTQWPDMGVPEYSLPVLTFVRKAAYAKRHAVGPVVVHCSAGVGRTGTYIVLDSMLQQIQHEGTVNIFGFLKHIRSQRNYLVQTEEQYVFIHDTLVEAILSKETEVLDSHIHAYVNALLIPGPAGKTKLEKQFQGLTLSPRLECRGTISAHCNLPLPGLTDPPTSASRVARTILLSQSNIQQSDYSAALKQCNREKNRTSSIIPVERSRVGISSLSGEGTDYINASYIMGYYQSNEFIITQHPLLHTIKDFWRMIWDHNAQLVVMIPDGQNMAEDEFVYWPNKDEPINCESFKVTLMAEEHKCLSNEEKLIIQDFILEATQDDYVLEVRHFQCPKWPNPDSPISKTFELISVIKEEAANRDGPMIVHDEHGGVTAGTFCALTTLMHQLEKENSVDVYQVAKMINLMRPGVFADIEQYQFLYKVILSLVSTRQEENPSTSLDSNGAALPDGNIAESLESLV

SEQ ID NO: 4100 - protein, 866 aa, Homo sapiens
MFSMRIVCLVLSVVGTAWTADSGEGDFLAEGGGVRGPRVVERHQSACKDSDWPFCSDEDWNYKCPSGCRMKGLIDEVNQDFTNRINKLKNSLFEYQKNNKDSHSLTTNIMEILRGDFSSANNRDNTYNRVSEDLRSRIEVLKRKVIEKVQHIQLLQKNVRAQLVDMKRLEVDIDIKIRSCRGSCSRALAREVDLKDYEDQQKQLEQVIAKDLLPSRDRQHLPLIKMKPVPDLVPGNFKSQLQKVPPEWKALTDMPQMRMELERPGGNEITRGGSTSYGTGSETESPRNPSSAGSWNSGSSGPGSTGNRNPGSSGTGGTATWKPGSSGPGSTGSWNSGSSGTGSTGNQNPGSPRPGSTGTWNPGSSERGSAGHWTSESSVSGSTGQWHSESGSFRPDSPGSGNARPNNPDWGTFEEVSGNVSPGTRREYHTEKLVTSKGDKELRTGKEKVTSGSTTTTRRSCSKTVTKTVIGPDGHKEVTKEVVTSEDGSDCPEAMDLGTLSGIGTLDGFRHRHPDEAAFFDTASTGKTFPGFFSPMLGEFVSETESRGSESGIFTNTKESSSHHPGIAEFPSRGKSSSYSKQFTSSTSYNRGDSTFESKSYKMADEAGSEADHEGTHSTKRGHAKSRPVRDCDDVLQTHPSGTQSGIFNIKLPGSSKIFSVYCDQETSLGGWLLIQQRMDGSLNFNRTWQDYKRGFGSLNDEGEGEFWLGNDYLHLLTQRGSVLRVELEDWAGNEAYAEYHFRVGSEAEGYALQVSSYEGTAGDALIEGSVEEGAEYTSHNNMQFSTFDRDADQWEENCAEVYGGGWWYNNCQAANLNGIYYPGGSYDPRNNSPYEIENGVVWVSFRGADYSLRAVRMKIRPLVTQ

SEQ ID NO: 4101 - protein, 365 aa, Homo sapiens
MFPPSGSTGLIPPSHFQARPLSTLPRMAPTWLSDIPLVQPPGHQDVSERRLDTQRPQVTMWERDVSSDRQEPGRRGRSWGLEGSQALSQQAEVIVRQLQELRRLEEEVRLLRETSLQQKMRLEAQAMELEALARAEKAGRAEAEGLRAALAGAEVVRKNLEEGSQRELEEVQRLHQEQLSSLTQAHEEALSSLTSKAEGLEKSLSSLETRRAGEAKELAEAQREAELLRKQLSKTQEDLEAQVTLVENLRKYVGEQVPSEVHSQTWELERQKLLETMQHLQEDRDSLHATAELLQVRVQSLTHILALQEEELTRKVQPSDSLEPEFTRKCQSLLNRWREKVFALMVQLKAQELEHSDSVKQLKGQ

SEQ ID NO: 4102 - protein, 61 aa, Homo sapiens
MNRSIPVEVDESEPYPSQLLKPIPEYSPEEESEPPAPNIRNMAPNSLSAPTMLHNSSGDFS

SEQ ID NO: 4103 - protein, 854 aa, Homo sapiens
MGELCRRDSALTALDEETLWEMMESHRHRIVRCICPSRLTPYLRQAKVLCQLDEEEVLHSPRLTNSAMRAGHLLDLLKTRGKNGAIAFLESLKFHNPDVYTLVTGLQPDVDFSNFSGLMETSKLTECLAGAIGSLQEELNQEKGQKEVLLRRCQQLQEHLGLAETRAEGLHQLEADHSRMKREVSAHFHEVLRLKDEMLSLSLHYSNALQEKELAASRCRSLQEELYLLKQELQRANMVSSCELELQEQSLRTASDQESGDEELNRLKEENEKLRSLTFSLAEKDILEQSLDEARGSRQELVERIHSLRERAVAAERQREQYWEEKEQTLLQFQKSKMACQLYREKVNALQAQVCELQKERDQAYSARDSAQREISQSLVEKDSLRRQVFELTDQVCELRTQLRQLQAEPPGVLKQEARTREPCPREKQRLVRMHAICPRDDSDCSLVSSTESQLLSDLSATSSRELVDSFRSSSPAPPSQQSLYKRVAEDFGEEPWSFSSCLEIPEGDPGALPGAKAGDPHLDYELLDTADLPQLESSLQPVSPGRLDVSESGVLMRRRPARRILSQVTMLAFQGDALLEQISVIGGNLTGIFIHRVTPGSAADQMALRPGTQIVMVDYEASEPLFKAVLEDTTLEEAVGLLRRVDGFCCLSVKVNTDGYKRLLQDLEAKVATSGDSFYIRVNLAMEGRAKGELQVHCNEVLHVTDTMFQGCGCWHAHRVNSYTMKDTAAHGTIPNYSRAQQQLIALIQDMTQQCTVTRKPSSGGPQKLVRIVSMDKAKASPLRLSFDRGQLDPSRMEGEAWLQHVLLGRELPHPGALYPGAAPSTRPAPACAPRAQGGWEDPERETVPPPRV

SEQ ID NO: 4104 - protein, 2852 aa, Homo sapiens
MASEDNRVPSPPPTGDDGGGGGREETPTEGGALSLKPGLPIRGIRMKFAVLTGLVEVGEVSNRDIVETVFNLLVGGQFDLEMNFIIQEGESINCMVDLLEKCDITCQAEVWSMFTAILKKSIRNLQVCTEVGLVEKVLGKIEKVDNMIADLLVDMLGVLASYNLTVRELKLFFSKLQGDKGRWPPHAGKLLSVLKHMPQKYGPDAFFNFPGKSAAAIALPPIAKWPYQNGFTFHTWLRMDPVNNINVDKDKPYLYCFRTSKGLGYSAHFVGGCLIVTSIKSKGKGFQHCVKFDFKPQKWYMVTIVHIYNRWKNSELRCYVNGELASYGEITWFVNTSDTFDKCFLGSSETADANRVFCGQMTAVYLFSEALNAAQIFAIYQLGLGYKGTFKFKAESDLFLAEHHKLLLYDGKLSSAIAFTYNPRATDAQLCLESSPKDNPSIFVHSPHALMLQDVKAVLTHSIQSAMHSIGGVQVLFPLFAQLDYRQYLSDEIDLTICSTLLAFIMELLKNSIAMQEQMLACKGFLVIGYSLEKSSKSHVSRAVLELCLAFSKYLSNLQNGMPLLKQLCDHVLLNPAIWIHTPAKVQLMLYTYLSTEFIGTVNIYNTIRRVGTVLLIMHTLKYYYWAVNPQDRSGITPKGLDGPRPNQKEMLSLRAFLLMFIKQLVMKDSGVKEDELQAILNYLLTMHEDDNLMDVLQLLVALMSEHPNSMIPAFDQRNGLRVIYKLLASKSEGIRVQALKAMGYFLKHLAPKRKAEVMLGHGLFSLLAERLMLQTNLITMTTYNVLFEILIEQIGTQVIHKQHPDPDSSVKIQNPQILKVIATLLRNSPQCPESMEVRRAFLSDMIKLFNNSRENRRSLLQCSVWQEWMLSLCYFNPKNSDEQKITEMVYAIFRILLYHAVKYEWGGWRVWVDTLSITHSKVTFEIHKENLANIFREQQGKVDEEIGLCSSTSVQAASGIRRDINVSVGSQQPDTKDSPVCPHFTTNGNENSSIEKTSSLESASNIELQTTNTSYEEMKAEQENQELPDEGTLEETLTNETRNADDLEVSSDIIEAVAISSNSFITTGKDSMTVSEVTASISSPSEEDASEMPEFLDKSIVEEEEDDDYVELKVEGSPTEEANLPTELQDNSLSPAASEAGEKLDMFGNDDKLIFQEGKPVTEKQTDTETQDSKDSGIQTMTASGSSAMSPETTVSQIAVESDLGQMLEEGKKATNLTRETKLINDCHGSVSEASSEQKIAKLDVSNVATDTERLELKASPNVEAPQPHRHVLEISRQHEQPGQGIAPDAVNGQRRDSRSTVFRIPEFNWSQMHQRLLTDLLFSIETDIQMWRSHSTKTVMDFVNSSDNVIFVHNTIHLISQVMDNMVMACGGILPLLSAATSATHELENIEPTQGLSIEASVTFLQRLISLVDVLIFASSLGFTEIEAEKSMSSGGILRQCLRLVCAVAVRNCLECQQHSQLKTRGDKALKPMHSLIPLGKSAAKSPVDIVTGGISPVRDLDRLLQDMDINRLRAVVFRDIEDSKQAQFLALAVVYFISVLMVSKYRDILEPQNERHSQSCTETGSENENVSLSEITPAAFSTLTTASVEESESTSSARRRDSGIGEETATGLGSHVEVTPHTAPPGVSAGPDAISEVLSTLSLEVNKSPETKNDRGNDLDTKATPSVSVSKNVNVKDILRSLVNIPADGVTVDPALLPPACLGALGDLSVEQPVQFRSFDRSVIVAAKKSAVSPSTFNTSIPTNAVSVVSSVDSAQASDMGGESPGSRSSNAKLPSVPTVDSVSQDPVSNMSITERLEHALEKAAPLLREIFVDFAPFLSRTLLGSHGQELLIEGTSLVCMKSSSSVVELVMLLCSQEWQNSIQKNAGLAFIELVNEGRLLSQTMKDHLVRVANEAEFILSRQRAEDIHRHAEFESLCAQYSADKREDEKMCDHLIRAAKYRDHVTATQLIQKIINILTDKHGAWGNSAVSRPLEFWRLDYWEDDLRRRRRFVRNPLGSTHPEATLKTAVEHATDEDILAKGKQSIRSQALGNQNSENEILLEGDDDTLSSVDEKDLENLAGPVSLSTPAQLVAPSVVVKGTLSVTSSELYFEVDEEDPNFKKIDPKILAYTEGLHGKWLFTEIRSIFSRRYLLQNTALEIFMANRVAVMFNFPDPATVKKVVNYLPRVGVGTSFGLPQTRRISLASPRQLFKASNMTQRWQHREISNFEYLMFLNTIAGRSYNDLNQYPVFPWVITNYESEELDLTLPTNFRDLSKPIGALNPKRAAFFAERYESWEDDQVPKFHYGTHYSTASFVLAWLLRIEPFTTYFLNLQGGKFDHADRTFSSISRAWRNSQRDTSDIKELIPEFYYLPEMFVNFNNYNLGVMDDGTVVSDVELPPWAKTSEEFVHINRLALESEFVSCQLHQWIDLIFGYKQQGPEAVRALNVFYYLTYEGAVNLNSITDPVLREAVEAQIRSFGQTPSQLLIEPHPPRGSAMQVSPLMFTDKAQQDVIMVLKFPSNSPVTHVAANTQPGLATPAVITVTANRLFAVNKWHNLPAHQGAVQDQPYQLPVEIDPLIASNTGMHRRQITDLLDQSIQVHSQCFVITSDNRYILVCGFWDKSFRVYSTDTGRLIQVVFGHWDVVTCLARSESYIGGNCYILSGSRDATLLLWYWNGKCSGIGDNPGSETAAPRAILTGHDYEVTCAAVCAELGLVLSGSQEGPCLIHSMNGDLLRTLEGPENCLKPKLIQASREGHCVIFYENGLFCTFSVNGKLQATMETDDNIRAIQLSRDGQYLLTGGDRGVVVVRQVSDLKQLFAYPGCDAGIRAMALSYDQRCIISGMASGSIVLFYNDFNRWHHEYQTRY

SEQ ID NO: 4105 - protein, 712 aa, Homo sapiens
MKIKFKIKVVPALWCFYGGESALGVQSINWQTAFNRQAHHTDKFSSQELILRRGQNFQVLMIMNKGLGSNERLEFIVSTGPYPSESAMTKAVFPLSNGSSGGWSAVLQASNGNTLTISISSPASAPIGRYTMALQIFSQGGISSVKLGTFILLFNPWLNVDSVFMGNHAEREEYVQEDAGIIFVGSTNRIGMIGWNFGQFEEDILSICLSILDRSLNFRRDAATDVASRNDPKYVGRVLSAMINSNDDNGVLAGNWSGTYTGGRDPRSWNGSVEILKNWKKSGFSPVRYGQCWVFAGTLNTALRSLGIPSRVITNFNSAHDTDRNLSVDVYYDPMGNPLDKGSDSVWNFHVWNEGWFVRSDLGPSYGGWQVLDATPQERSQGVFQCGPASVIGVREGDVQLNFDMPFIFAEVNADRITWLYDNTTGKQWKNSVNSHTIGRYISTKAVGSNARMDVTDKYKYPEGSDQERQVFQKALGKLKPNTPFAATSSMGLETEEQEPSIIGKLKVAGMLAVGKEVNLVLLLKNLSRDTKTVTVNMTAWTIIYNGTLVHEVWKDSATMSLDPEEEAEHPIKISYAQYEKYLKSDNMIRITAVCKVPDESEVVVERDIILDNPTLTLEVLNEARVRKPVNVQMLFSNPLDEPVRDCVLMVEGSGLLLGNLKIDVPTLGPKEGSRVRFDILPSRSGTKQLLADFSCNKFPAIKAMLSIDVAE

SEQ ID NO: 4106 - protein, 1521 aa, Homo sapiens
MKGSEVSLEKKKKIKMPVKRLREVVSQNHGDHLVLLKDELPCVPPALSANKRLPVGTGTSLNGTSRGSSDLTSARNCYQPLLENPMVSESDFSKDVAVQVLPLDKIEENNKQKANDIFISQYTMGQKDALRTVLKQKAQSMPVFKEVKVHLLEDAGIEKDAVTQETRISPSGIDSATTVAAATAAAIATAAPLIKVQSDLEAKVNSVTELLSKLQETDKHLQRVTEQQTSIQRKQEKLHCHDHEKQMNVFMEQHIRHLEKLQQQQIDIQTHFISAALKTSSFQPVSMPSSRAVEKYSVKPEHPNLGSCNPSLYNTFASKQAPLKEVEDTSFDKQKSPLETPAPRRFAPVPVSRDDELSKRENLLEEKENMEVSCHRGNVRLLEQILNNNDSLTRKSESSNTTSLTRSKIGWTPEKTNRFPSCEELETTKVTMQKSDDVLHDLGQKEKETNSMVQPKESLSMLKLPDLPQNSVKLQTTNTTRSVLKDAEKILRGVQNNKKVLEENLEAIIRAKDGAAMYSLINALSTNREMSEKIRIRKTVDEWIKTISAEIQDELSRTDYEQKRFDQKNQRTKKGQNMTKDIRTNTQDKTVNKSVIPRKHSQKQIEEHFRNLPMRGMPASSLQKERKEGLLKATTVIQDEDYMLQVYGKPVYQGHRSTLKKGPYLRFNSPSPKSRPQRPKVIERVKGTKVKSIRTQTDFYATKPKKMDSKMKHSVPVLPHGDQQYLFSPSREMPTFSGTLEGHLIPMAILLGQTQSNSDTMPPAGVIVSKPHPVTVTTSIPPSSRKVETGVKKPNIAIVEMKSEKKDPPQLTVQVLPSVDIDSISNSSADVLSPLSSPKEASLPPVQTWIKEEEKCDEIPDSEPILEFNRSVKADSTKYNGPPFPPVASTFQPTADILDKVIERKETLENSLIQWVEQEIMSRIISGLFPVQQQIAPSISVSVSETSEPLTSDIVEGTSSGALQLFVDAGVPVNSNVIKHFVNEALAETIAVMLGDREAKKQGPVATGVSGDASTNETYLPARVCTPLPTPQPTPPCSPSSPAKECVLVKTPDSSPCDSDHDMAFPVKEICAEKGDDMPAIMLVNTPTVTPTTTPPPAAAVFTPTLSDISIDKLKVSSPELPKPWGDGDLPLEEENPNSPQEELHPRAIVMSVAKDEEPESMDFPAQPPPPEPVPFMPFPAGTKAPSPSQMPGSDSSTLESTLSVTVTETETLDKPISEGEILFSCGQKLAPKILEDIGLYLTNLNDSLSSTLHDAVEMEDDPPSEGQVIRMSHKKFHADAILSFAKQNQESAVSQQAVYHSEDLENSVGELSEGQRPQLTAAAENILMGHSLYMQPPVTNTQSLDQQCDPKPLSRQFDTVSGSIYEDSCASHGPMSLGELELEPNSKLVLPTTLLTAQENDVNLPVAAEDFSQYQLKQNQDVKQVEHKPSQSYLRVRNKSDIAPSQQQVSPGDMDRTQIELNPYLTCVFSGGKAVPLSASQMPPAKMSVMLPSVNLEDCSQSLSLSTMQEDMESSGADTF

SEQ ID NO: 4107 - protein, 108 aa, Homo sapiens
MTWTSGQLQREKQARPGSGAVLAFPDDKDLRVYGPAESQSAVFGDVCPLLTSLLDGYNVCVMAYGQTGSGKSYTMLGRHSDDGPVLPLDPQSDLGIIPRVAEELFRAQ

SEQ ID NO: 4108 - protein, 374 aa, Homo sapiens
MDRAPQRQHRASRELLAAKKTHTSQIEVIPCKICGDKSSGIHYGVITCEGCKGFFRRSQRCNAAYSCTRQQNCPIDRTSRNRCQHCRLQKCLALGMSRDAVKFGRMSKKQRDSLHAEVQKQLQQRQQQQQEPVVKTPPAGAQGADTLTYTLGLPDGQLPLGSSPDLPEASACPPGLLKASGSGPSYSNNLAKAGLNGASCHLEYSPERGKAEGRESFYSTGSQLTPDRCGLRFEEHRHPGLGELGQGPDSYGSPSFRSTPEAPYASLTEIEHLVQSVCKSYRETCQLRLEDLLRQRSNIFSREEVTGYQRKFIRWGSRAQEDHRATQSATAGPSSLPAVHVGDVGTVCPPPHRGHSVRGGVRQEALRLYGALPE

SEQ ID NO: 4109 - protein, 1932 aa, Homo sapiens
MAPGALRGGCEQRAPGGGARTAALGPWPWPSPGPAPSPGAAPPRSRKMSGALLWPLLPLLLLLLSARDGVRAAQPQAPGYLIAAPSVFRAGVEEVISVTIFNSPREVTVQAQLVAQGEPVVQSQGAILDKGTIKLKVPTGLRGQALLKVWGRGWQAEEGPLFHNQTSVTVDGRGASVFIQTDKPVYRPQHRVLISIFTVSPNLRPVNEKLEAYILDPRGSRMIEWRHLKPFCCGITNMSFPLSDQPVLGEWFIFVEMQGHAYNKSFEVQKYVLPKFELLIDPPRYIQDLDACETGTVRARYTFGKPVAGALMINMTVNGVGYYSHEVGRPVLRTTKILGSRDFDICVRDMIPADVPEHFRGRVSIWAMVTSVDGSQQVAFDDSTPVQRQLVDIRYSKDTRKQFKPGLAYVGKVELSYPDGSPAEGVTVQIKAELTPKDNIYTSEVVSQRGLVGFEIPSIPTSAQHVWLETKVMALNGKPVGAQYLPSYLSLGSWYSPSQCYLQLQPPSHPLQVGEEAYFSVKSTCPCNFTLYYEVAARGNIVLSGQQPAHTTQQRSKRAAPALEKPIRLTHLSETEPPPAPEAEVDVCVTSLHLAVTPSMVPLGRLLVFYVRENGEGVADSLQFAVETFFENQVSVTYSANETQPGEVVDLRIRAARGSCVCVAAVDKSVYLLRSGFRLTPAQVFQELEDYDVSDSFGVSREDGPFWWAGLTAQRRRRSSVFPWPWGITKDSGFAFTETGLVVMTDRVSLNHRQDGGLYTDEAVPAFQPHTGSLVAVAPSRHPPRTEKRKRTFFPETWIWHCLNISDPSGEGTLSVKVPDSITSWVGEAVALSTSQGLGIAEPSLLKTFKPFFVDFMLPALIIRGEQVKIPLSVYNYMGTCAEVYMKLSVPKGIQFVGHPGKRHVTKKMCVAPGEAEPIWVVLSFSDLGLNNITAKALAYGDTNCCRDGRSSKHPEENHADRRVPIGVDHVRRSVMVEAEGVPRAYTYSAFFCPSERVHISTPNKYEFQYVQRPLRLTRFDVAVRAHNDARVALSSGPQDTAGMIEIVLGGHQNTRSWISTSKMGEPVASAHTAKILSWDEFRTFWISWRGGLIQVGHGPEPSNESVIVAWTLPRPPEVQFIGFSTGWGSMGEFRIWRKMEVDESYSEAFTLGVPHGAIPGSERATASIIGDVMGPTLNHLNNLLRLPFGCGEQNMIHFAPNVFVLKYLQKTQQLSPEVERETTDYLVQGYQRQLTYKRQDGSYSAFGERDASGSMWLTAFVLKSFAQARSFIFVDPRELAAAKSWIIQQQQADGSFLAVGRVLNKDIQGGIHGTVPLTAYVVVALLETGTASEEERGSTDKARHFLESAAPLAMDPYSCALTTYALTLLRSPAAPEALRKLRSLAIMRDGVTHWSLSNSWDVDKGTFLSFSDRVSQSVVSAEVEMTAYALLTYTLLGDVAAALPVVKWLSQQRNALGGFSSTQDTCVALQALAEYAILSYAGGINLTVSLASTNLDYQETFELHRTNQKVLQTAAIPSLPTGLFVSAKGDGCCLMQIDVTYNVPDPVAKPAFQLLVSLQEPEAQGRPPPMPASAAEGSRGDWPPADDDDPAADQHHQEYKVMLEVCTRWLHAGSSNMAVLEVPLLSGFRADIESLEQLLLDKHMGMKRYEVAGRRVLFYFDEIPSRCLTCVRFRALRECVVGRTSALPVSVYDYYEPAFEATRFYNVSTHSPLARELCAGPACNEVERAPARGPGWFPGESGPAVAPEEGAAIARCGCDHDCGAQGNPVCGSDGVVYASACRLREAACRQAAPLEPAPPSCCALEQRLPASSSSTYGDDLASVAPGPLQQDVKLNGAGLEVEDSDPEPEGEAEDRVTAGPRPPVSSGNLESSTQSASPFHRWGQTPAPQRHSGRVVGAHRPGLLSPVFVYSPAFQSGGEEGLWMSNTCTLR

SEQ ID NO: 4110 - protein, 1009 aa, Homo sapiens
MNGEYRGRGFGRGRFQSWKRGRGGGNFSGKWREREHRPDLSKTTGKRTSEQTPQFLLSTKTPQSMQSTLDRFIPYKGWKLYFSEVYSDSSPLIEKIQAFEKFFTRHIDLYDKDEIERKGSILVDFKELTEGGEVTNLIPDIATELRDAPEKTLACMGLAIHQVLTKDLERHAAELQAQEGLSNDGETMVNVPHIHARVYNYEPLTQLKNVRANYYGKYIALRGTVVRVSNIKPLCTKMAFLCAACGEIQSFPLPDGKYSLPTKCPVPVCRGRSFTALRSSPLTVTMDWQSIKIQELMSDDQREAGRIPRTIECELVHDLVDSCVPGDTVTITGIVKVSNAEEGSRNKNDKCMFLLYIEANSISNSKGQKTKSSEDGCKHGMLMEFSLKDLYAIQEIQAEENLFKLIVNSLCPVIFGHELVKAGLALALFGGSQKYADDKNRIPIRGDPHILVVGDPGLGKSQMLQAACNVAPRGVYVCGNTTTTSGLTVTLSKDSSSGDFALEAGALVLGDQGICGIDEFDKMGNQHQALLEAMEQQSISLAKAGVVCSLPARTSIIAAANPVGGHYNKAKTVSENLKMGSALLSRFDLVFILLDTPNEHHDHLLSEHVIAIRAGKQRTISSATVARMNSQDSNTSVLEVVSEKPLSERLKVVPGETIDPIPHQLLRKYIGYARQYVYPRLSTEAARVLQDFYLELRKQSQRLNSSPITTRQLESLIRLTEARARLELREEATKEDAEDIVEIMKYSMLGTYSDEFGNLDFERSQHGSGMSNRSTAKRFISALNNVAERTYNNIFQFHQLRQIAKELNIQYENPWTIPNMLSMTRIGLAPVLGYLIIEEDFNIALGVFALAGLTDLLDGFIARNWANQRSALGSALDPLADKILISILYVSLTYADLIPVPLTYMIISRDVMLIAAVFYVRYRTLPTPRTLAKYFNPCYATARLKPTFISKVNTAVQLILVAASLAAPVFNYADSIYLQILWCFTAFTTAASAYSYYHYGRKTVQVIKD

SEQ ID NO: 4111 - protein, 570 aa, Homo sapiens
MPVKRLREVVSQNHGDHLVLLKDELPCVPPALSANKRLPVGTGTSLNGTSRGSSDLTSARNCYQPLLENPMVSESDFSKDVAVQVLPLDKIEENNKQKANDIFISQYTMGQKDALRTVLKQKAQSMPVFKEVKVHLLEDAGIEKDAVTQETRISPSGIDSATTVAAATAAAIATAAPLIKVQSDLEAKVNSVTELLSKLQETDKHLQRVTEQQTSIQRKQEKLHCHDHEKQMNVFMEQHIRHLEKLQQQQIDIQTHFISAALKTSSFQPVSMPSSRAVEKYSVKPEHPNLGSCNPSLYNTFASKQAPLKEVEDTSFDKQKSPLETPAPRRFAPVPVSRDDELSKRENLLEEKENMEVSCHRGNVRLLEQILNNNDSLTRKSESSNTTSLTRSKIGWTPEKTNRFPSCEELETTKVTMQKSDDVLHDLGQKEKETNSMVQPKESLSMLKLPDLPQNSVKLQTTNTTRSVLKDAEKILRGVQNNKKVLEENLEAIIRAKDGAAMYSLINALSTNREMSEKIRIRKTVDEWIKTISAEIQDELSRTDYEQKRFDQKNQRTKKGAFESNHSNTR

SEQ ID NO: 4112 - protein, 89 aa, Homo sapiens
MVSESDFSKDVAVQVLPLDKIEENNKQKANDIFISQYTMGQKDALRTVLKQKDRVCHVAQLVLNSWAQAVFLPQPPTVLGLQSSKHACF

SEQ ID NO: 4113 - protein, 709 aa, Homo sapiens
MGHRTAMPEPRGSSQLRVNAAFAARYNRYREREELQRLKDRYGDRDSSSDSSSESDSSDERVEFDPQQERDFYKTLSLLKKKDPRIYQKDATFYNRTASSSDSEEDPEALEKQKKVRPMYLKDYERKVILEKAGKYVDEENSDGETSNHRLQETSSQSYVEEQKQLKESFRAFVEDSEDEDGAGEGGSSLLQKRAKTRQEKAQEEADYIEWLKGQKEIRNPDSLKELTHLKEYWNDPELDEGERFLRDYILNKRYEEEEEEEEDEEEMEEEEGVHGPPVQLAVDDSSDEGELFLKKQEDFEQKYNFRFEEPDSASVKTYPRSIASSVRRKDERRKEKREETRERKKREKAKKQEELKQLKNLKRKEILAKLEKLRKVTGNEMLGLEEGDLEDDFDPAQHDQLMQKCFGDEYYGAVEEEKPQFEEEEGLEDDWNWDTWDGPEQEGDWSQQELHCEDPNFNMDADYDPSQPRKKKREAPLTGKKKRKSPFAAAVGQEKPVFEPGDKTFEEYLDEYYRLDYEDIIDDLPCRFKYRTVVPCDFGLSTEEILAADDKELNRWCSLKKTCMYRSEQEELRDKRAYSQKAQNSWKKRQVFKSLCREEAETPAEATGKPQRDEAGPQRQLPALDGSLMGPESPPAQEEEAPVSPHKKPAPQKRRRAKKARLLGPTVMLGGCEFSRQRLQAFGLNPKRLHFRQLGRQRRKQQGPKNSS

SEQ ID NO: 4114 - protein, 93 aa, Homo sapiens
MDGASAEQDGLQEDRSHSGPSSLPEAPLKPPGPLVPPDQQDKVQCAEVNRASTEGESPDGPGQGGLCQNGPTPPFPDPPSSLDPTTSPVGPDA

SEQ ID NO: 4115 - protein, 653 aa, Homo sapiens
MRLPDLRPWTSLLLVDAALLWLLQGPLGTLLPQGLPGLWLEGTLRLGGLWGLLKLRGLLGFVGTLLLPLCLATPLTVSLRALVAGASRAPPARVASAPWSWLLVGYGAAGLSWSLWAVLSPPGAQEKEQDQVNNKVLMWRLLKLSRPDLPLLVAAFFFLVLAVLGETLIPHYSGRVIDILGGDFDPHAFASAIFFMCLFSFGSSLSAGCRGGCFTYTMSRINLRIREQLFSSLLRQDLGFFQETKTGELNSRLSSDTTLMSNWLPLNANVLLRSLVKVVGLYGFMLSISPRLTLLSLLHMPFTIAAEKVYNTRHQEVLREIQDAVARAGQVVREAVGGLQTVRSFGAEEHEVCRYKEALEQCRQLYWRRDLERALYLLVRRVLHLGVQMLMLSCGLQQMQDGELTQGSLLSFMIYQESVGSYVQTLVYIYGDMLSNVGAAEKVFSYMDRQPNLPSPGTLAPTTLQGVVKFQDVSFAYPNRPDRPVLKGLTFTLRPGEVTALVGPNGSGKSTVAALLQNLYQPTGGQVLLDEKPISQYEHCYLHSQVVSVGQEPVLFSGSVRNNIAYGLQSCEDDKVMAAAQAAHADDFIQEMEHGIYTDVGEKGSQLAAGQKQRLAIARALVRDPRVLILDEATSALDVQCEQAKTLWKFMIF

SEQ ID NO: 4116 - protein, 818 aa, Homo sapiens
MAQWEMLQNLDSPFQDQLHQLYSHSLLPVDIRQYLAVWIEDQNWQEAALGSDDSKATMLFFHFLDQLNYECGRCSQDPESLLLQHNLRKFCRDIQPFSQDPTQLAEMIFNLLLEEKRILIQAQRAQLEQGEPVLETPVESQQHEIESRILDLRAMMEKLVKSISQLKDQQDVFCFRYKIQAKGKTPSLDPHQTKEQKILQETLNELDKRRKEVLDASKALLGRLTTLIELLLPKLEEWKAQQQKACIRAPIDHGLEQLETWFTAGAKLLFHLRQLLKELKGLSCLVSYQDDPLTKGVDLRNAQVTELLQRLLHRAFVVETQPCMPQTPHRPLILKTGSKFTVRTRLLVRLQEGNESLTVEVSIDRNPPQLQGFRKFNILTSNQKTLTPEKGQSQGLIWDFGYLTLVEQRSGGSGKGSNKGPLGVTEELHIISFTVKYTYQGLKQELKNQQFFSNPPKAPWSLLGPALSWQFSSYVGRGLNSDQLSMLRNKLFGQNCRTEDPLLSWADFTKRESPPGKLPFWTWLDKILELVHDHLKDLWNDGRIMGFVSRSQERRLLKKTMSGTFLLRFSESSEGGITCSWVEHQDDDKVLIYSVQPYTKEVLQSLPLTEIIRHYQLLTEENIPENPLRFLYPRIPRDEAFGCYYQEKVNLQERRKYLKHRLIVVSNRQVDELQQPLELKPEPELESLELELGLVPEPELSLDLEPLLKAGLDLGPELESVLESTLEPVIEPTLCMVSQTVPEPDQGPVSQPVPEPDLPCDLRHLNTEPMEIFRNCVKIEEIMPNGDPLLAGQNTVDEVYVSRPSHFYTDGPLMPSDF

SEQ ID NO: 4117 - protein, 126 aa, Homo sapiens
MPPQLQETRMNRSIPVEVDESEPYPSQLLKPIPEYSPEEESEPPAPNIRNMAPNSLSAPTMLHNSSGDFSQAHSTLKLANHQRPVSRQVTCLRTQVLEDSEDSFCRRHPGLGKAFPSGCSAVSEPA

SEQ ID NO: 4118 - protein, 1548 aa, Homo sapiens
MKGSEVSLEKKKKIKMPVKRLREVVSQNHGDHLVLLKDELPCVPPALSANKRLPVGTGTSLNGTSRGSSDLTSARNCYQPLLENPMVSESDFSKDVAVQVLPLDKIEENNKQKANDIFISQYTMGQKDALRTVLKQKAQSMPVFKEVKVHLLEDAGIEKDAVTQETRISPSGIDSATTVAAATAAAIATAAPLIKVQSDLEAKVNSVTELLSKLQETDKHLQRVTEQQTSIQRKQEKLHCHDHEKQMNVFMEQHIRHLEKLQQQQIDIQTHFISAALKTSSFQPVSMPSSRAVEKYSVKPEHPNLGSCNPSLYNTFASKQAPLKEVEDTSFDKQKSPLETPAPRRFAPVPVSRDDELSKRENLLEEKENMEVSCHRGNVRLLEQILNNNDSLTRKSESSNTTSLTRSKIGWTPEKTNRFPSCEELETTKVTMQKSDDVLHDLGQKEKETNSMVQPKESLSMLKLPDLPQNSVKLQTTNTTRSVLKDAEKILRGVQNNKKVLEENLEAIIRAKDGAAMYSLINALSTNREMSEKIRIRKTVDEWIKTISAEIQDELSRTDYEQKRFDQKNQRTKKGQNMTKDIRTNTQDKTVNKSVIPRKHSQKQIEEHFRNLPMRGMPASSLQKERKEGLLKATTVIQDEDYMLQVYGKPVYQGHRSTLKKGPYLRFNSPSPKSRPQRPKVIERVKGTKVKSIRTQTDFYATKPKKMDSKMKHSVPVLPHGDQQYLFSPSREMPTFSGTLEGHLIPMAILLGQTQSNSDTMPPAGVIVSKPHPVTVTTSIPPSSRKVETGVKKPNIAIVEMKSEKKDPPQLTVQVLPSVDIDSISNSSADVLSPLSSPKEASLPPVQTWIKTPEIMKVDEEEVKFPGTNFDEIIDVIQEEEKCDEIPDSEPILEFNRSVKADSTKYNGPPFPPVASTFQPTADILDKVIERKETLENSLIQWVEQEIMSRIISGLFPVQQQIAPSISVSVSETSEPLTSDIVEGTSSGALQLFVDAGVPVNSNVIKHFVNEALAETIAVMLGDREAKKQGPVATGVSGDASTNETYLPARVCTPLPTPQPTPPCSPSSPAKECVLVKTPDSSPCDSDHDMAFPVKEICAEKGDDMPAIMLVNTPTVTPTTTPPPAAAVFTPTLSDISIDKLKVSSPELPKPWGDGDLPLEEENPNSPQEELHPRAIVMSVAKDEEPESMDFPAQPPPPEPVPFMPFPAGTKAPSPSQMPGSDSSTLESTLSVTVTETETLDKPISEGEILFSCGQKLAPKILEDIGLYLTNLNDSLSSTLHDAVEMEDDPPSEGQVIRMSHKKFHADAILSFAKQNQESAVSQQAVYHSEDLENSVGELSEGQRPQLTAAAENILMGHSLYMQPPVTNTQSLDQQCDPKPLSRQFDTVSGSIYEDSCASHGPMSLGELELEPNSKLVLPTTLLTAQENDVNLPVAAEDFSQYQLKQNQDVKQVEHKPSQSYLRVRNKSDIAPSQQQVSPGDMDRTQIELNPYLTCVFSGGKAVPLSASQMPPAKMSVMLPSVNLEDCSQSLSLSTMQEDMESSGADTF

SEQ ID NO: 4119 - protein, 698 aa, Homo sapiens
MFKKRRRRARKYTLVSYGTGELEREADEEEEGDKEDTCEVAFLGASESEVDEELLSDVDDNTQVVNFDWDSGLVDIEKKLNRGDKMEMLPDTTGKGALMFAKRRERMDQITAQKEEDKVGGTPSREQDAAQTDGLRTTTSYQRKEEESVRTQSSVSKSYIEVSHGLGHVPQQNGFSGTSETANIQRMVPMNRTAKPFPGSVNQPATPFSPTRNMTSPIADFPAPPPYSAVTPPPDAFSRGVSSPIAGPAQPPPWPQPAPWSQPAFYDSSERIASRDERISVPAKRTGILQEAKRRSTTKPMFTFKEPKVSPNPELLSLLQNSEGKRGTGAGGDSGPEEDYLSLGAEACNFMQSSSAKQKTPPPVAPKPAVKSSSSQPVTPVSPVWSPGVAPTQPPAFPTSNPSKGTVVSSIKIAQPSYPPARPASTLNVAGPFKGPQAAVASQNYTPKPTVSTPTVNAVQPGAVGPSNELPGMSGRGAQLFAKRQSRMEKYVVDSDTVQAHAARAQSPTPSLPASWKYSSNVRAPPPVAYNPIHSPSYPLAALKSQPSAAQPSKMGKKKGKKPLNALDVMKHQPYQLNASLFTFQPPDAKDGLPQKSSVKVNSALAMKQALPPRPVNAASPTNVQASSVYSVPAYTSPPSFFAEASSPVSASPVPVGIPTSPKQESASSSYFVAPRPKFSAKKSGVTIQVWKPSVVEE

SEQ ID NO: 4120 - protein, 1136 aa, Homo sapiens
MKKASRSVGSVPKVSAISKTQTAEKIKPENSSSASTGGKLVKPGTAASLSKGLTLLPRLEYGGVITAQCSFDLPGSSDPLTSTFPITRTTGMCHFAQTKSSDDLLAGMAGGVTVTNGVKGKKSTCPSAAPSASAPAMTTVENKSKISTGTASSTKRSTSTGQGANDMALAKRSRSRTATECDVRMSKSKSDNQISDRAALEAKVKDLLTLAKTKDVEILHLRNELRDMRAQLGINEDHSEGDEKSEKETIMAHQPTDVESTLLQLQEQNTAIREELNQLKNENRMLKDRLNALGFSLEQRLDNSEKLFGYQSLSPEITPGNQSDGGGTLTSSVEGSAPGSVEDLLSQDENTLMDHQHSNSMDNLDSECSEVYQPLTSSDDALDAPSSSESEGIPSIERSRKGSSGNASEVSVACLTERIHQMEENQHSTSEELQATLQELADLQQITQELNSENERLGEEKVILMESLCQQSDKLEHFSRQIEYFRSLLDEHHISYVIDEDVKSGRYMELEQRYMDLAENARFEREQLLGVQQHLSNTLKMAEQDNKEAQEMIGALKERSHHMERIIESEQKGKAALAATLEEYKATVASDQIEMNRLKAQLENEKQKVAELYSIHNSGDKSDIQDLLESVRLDKEKAETLASSLQEDLAHTRNDANRLQDAIAKVEDEYRAFQEEAKKQIEDLNMTLEKLRSDLDEKETERSDMKETIFELEDEVEQHRAVKLHDNLIISDLENTVKKLQDQKHDMEREIKTLHRRLREESAEWRQFQADLQTAVVIANDIKSEAQEEIGDLKRRLHEAQEKNEKLTKELEEIKSRKQEEERGRVYNYMNAVERDLAALRQGMGLSRRSSTSSEPTPTVKTLIKSFDSASQVPNPAAAAIPRTPLSPSPMKTPPAAAVSPMQRHSISGPISTSKPLTALSDKRPNYGEIPVQEHLLRTSSASRPASLPRVPAMESAKTLSVSRRSSEEVKRDISAQEGASPASLMAMGTTSPQLSLSSSPTASVTPTTRSRIREERKDPLSALAREYGGSKRNALLKWCQKKTEGYQNIDITNFSSSWNDGLAFCALLHTYLPAHIPYQELNSQDKRRNFMLAFQAAESVGIKSTLDINEMVRTERPDWQNVMLYVTAIYKYFET

SEQ ID NO: 4121 - protein, 105 aa, Homo sapiens
MNRSIPVEVDESEPYPSQLLKPIPEYSPEEESEPPAPNIRNMAPNSLSAPTMLHNSSGDFSQAHSTLKLANHQRPVSRQVTCLRTQVLEDSEDSFCRRHPGLGKA

SEQ ID NO: 4122 - protein, 171 aa, Homo sapiens
MAPGVLAGVVSVVAGLGDAVGRELHRERDMRLSWFRVLTVLSICLSAVATATGAEGKRKLQIGVKKRVDHCPIKSRKGDVLHMHYTGKLEDGTEFDSSLPQNQPFVFSLGTGQVIKGWDQGLLGMCEGEKRKLVIPSELGYGERGAPPKIPGGATLVFEVELLKIERRTEL

SEQ ID NO: 4123 - protein, 2308 aa, Homo sapiens
MRILKRFLACIQLLCVCRLDWANGYYRQQRKLVEEIGWSYTGALNQKNWGKKYPTCNSPKQSPINIDEDLTQVNVNLKKLKFQGWDKTSLENTFIHNTGKTVEINLTNDYRVSGGVSEMVFKASKITFHWGKCNMSSDGSEHSLEGQKFPLEMQIYCFDADRFSSFEEAVKGKGKLRALSILFEVGTEENLDFKAIIDGVESVSRFGKQAALDPFILLNLLPNSTDKYYIYNGSLTSPPCTDTVDWIVFKDTVSISESQLAVFCEVLTMQQSGYVMLMDYLQNNFREQQYKFSRQVFSSYTGKEEIHEAVCSSEPENVQADPENYTSLLVTWERPRVVYDTMIEKFAVLYQQLDGEDQTKHEFLTDGYQDLGAILNNLLPNMSYVLQIVAICTNGLYGKYSDQLIVDMPTDNPELDLFPELIGTEEIIKEEEEGKDIEEGAIVNPGRDSATNQIRKKEPQISTTTHYNRIGTKYNEAKTNRSPTRGSEFSGKGDVPNTSLNSTSQPVTKLATEKDISLTSQTVTELPPHTVEGTSASLNDGSKTVLRSPHMNLSGTAESLNTVSITEYEEESLLTSFKLDTGAEDSSGSSPATSAIPFISENISQGYIFSSENPETITYDVLIPESARNASEDSTSSGSEESLKDPSMEGNVWFPSSTDITAQPDVGSGRESFLQTNYTEIRVDESEKTTKSFSAGPVMSQGPSVTDLEMPHYSTFAYFPTEVTPHAFTPSSRQQDLVSTVNVVYSQTTQPVYNGETPLQPSYSSEVFPLVTPLLLDNQILNTTPAASSSDSALHATPVFPSVDVSFESILSSYDGAPLLPFSSASFSSELFRHLHTVSQILPQVTSATESDKVPLHASLPVAGGDLLLEPSLAQYSDVLSTTHAASETLEFGSESGVLYKTLMFSQVEPPSSDAMMHARSSGPEPSYALSDNEGSQHIFTVSYSSAIPVHDSVGVTYQGSLFSGPSHIPIPKSSLITPTASLLQPTHALSGDGEWSGASSDSEFLLPDTDGLTALNISSPVSVAEFTYTTSVFGDDNKALSKSEIIYGNETELQIPSFNEMVYPSESTVMPNMYDNVNKLNASLQETSVSISSTKGMFPGSLAHTTTKVFDHEISQVPENNFSVQPTHTVSQASGDTSLKPVLSANSEPASSDPASSEMLSPSTQLLFYETSASFSTEVLLQPSFQASDVDTLLKTVLPAVPSDPILVETPKVDKISSTMLHLIVSNSASSENMLHSTSVPVFDVSPTSHMHSASLQGLTISYASEKYEPVLLKSESSHQVVPSLYSNDELFQTANLEINQAHPPKGRHVFATPVLSIDEPLNTLINKLIHSDEILTSTKSSVTGKVFAGIPTVASDTFVSTDHSVPIGNGHVAITAVSPHRDGSVTSTKLLFPSKATSELSHSAKSDAGLVGGGEDGDTDDDGDDDDDDRGSDGLSIHKCMSCSSYRESQEKVMNDSDTHENSLMDQNNPISYSLSENSEEDNRVTSVSSDSQTGMDRSPGKSPSANGLSQKHNDGKEENDIQTGSALLPLSPESKAWAVLTSDEESGSGQGTSDSLNENETSTDFSFADTNEKDADGILAAGDSEITPGFPQSPTSSVTSENSEVFHVSEAEASNSSHESRIGLAEGLESEKKAVIPLVIVSALTFICLVVLVGILIYWRKCFQTAHFYLEDSTSPRVISTPPTPIFPISDDVGAIPIKHFPKHVADLHASSGFTEEFEEVQSCTVDLGITADSSNHPDNKHKNRYINIVAYDHSRVKLAQLAEKDGKLTDYINANYVDGYNRPKAYIAAQGPLKSTAEDFWRMIWEHNVEVIVMITNLVEKGRRKCDQYWPADGSEEYGNFLVTQKSVQVLAYYTVRNFTLRNTKIKKGSQKGRPSGRVVTQYHYTQWPDMGVPEYSLPVLTFVRKAAYAKRHAVGPVVVHCSAGVGRTGTYIVLDSMLQQIQHEGTVNIFGFLKHIRSQRNYLVQTEEQYVFIHDTLVEAILSKETEVLDSHIHAYVNALLIPGPAGKTKLEKQFQLLSQSNIQQSDYSAALKQCNREKNRTSSIIPVERSRVGISSLSGEGTDYINASYIMGYYQSNEFIITQHPLLHTIKDFWRMIWDHNAQLVVMIPDGQNMAEDEFVYWPNKDEPINCESFKVTLMAEEHKCLSNEEKLIIQDFILEATQDDYVLEVRHFQCPKWPNPDSPISKTFELISVIKEEAANRDGPMIVHDEHGGVTAGTFCALTTLMHQLEKENSVDVYQVAKMINLMRPGVFADIEQYQFLYKVILSLVSTRQEENPSTSLDSNGAALPDGNIAESLESLV

SEQ ID NO: 4124 - protein, 1013 aa, Homo sapiens
MGELCRRDSALTALDEETLWEMMESHRHRIVRCICPSRLTPYLRQAKVLCQLDEEEVLHSPRLTNSAMRAGHLLDLLKTRGKNGAIAFLESLKFHNPDVYTLVTGLQPDVDFSNFSGLMETSKLTECLAGAIGSLQEELNQEKGQKEVLLRRCQQLQEHLGLAETRAEGLHQLEADHSRMKREVSAHFHEVLRLKDEMLSLSLHYSNALQEKELAASRCRSLQEELYLLKQELQRANMVSSCELELQEQSLRTASDQESGDEELNRLKEENEKLRSLTFSLAEKDILEQSLDEARGSRQELVERIHSLRERAVAAERQREQYWEEKEQTLLQFQKSKMACQLYREKVNALQAQVCELQKERDQAYSARDSAQREISQSLVEKDSLRRQVFELTDQVCELRTQLRQLQAEPPGVLKQEARTREPCPREKQRLVRMHAICPRDDSDCSLVSSTESQLLSDLSATSSRELVDSFRSSSPAPPSQQSLYKRVAEDFGEEPWSFSSCLEIPEGDPGALPGAKAGDPHLDYELLDTADLPQLESSLQPVSPGRLDVSESGVLMRRRPARRILSQVTMLAFQGDALLEQISVIGGNLTGIFIHRVTPGSAADQMALRPGTQIVMVDYEASEPLFKAVLEDTTLEEAVGLLRRVDGFCCLSVKVNTDGYKRLLQDLEAKVATSGDSFYIRVNLAMEGRAKGELQVHCNEVLHVTDTMFQGCGCWHAHRVNSYTMKDTAAHGTIPNYSRAQQQLIALIQDMTQQCTVTRKPSSGGPQKLVRIVSMDKAKASPLRLSFDRGQLDPSRMEGEAWILSSTGSSTCFWAESCLTLVPYTLVRPHRPARPRPVLLVPRAVGKILSEKLCLLQGFKKCLAEYLSQEEYEAWSQRGDIIQEGEVSGGRCWVTRHAVESLMEKNTHALLDVQLDSVCTLHRMDIFPIVIHVSVNEKMAKKLKKGLQRLGTSEEQLLEAARQEEGDLDRAPCLYSSLAPDGWSDLDGLLSCVRQAIADEQKKVVWTEQSPR

SEQ ID NO: 4125 - protein, 313 aa, Homo sapiens
AQSRPGWLGVAALGLTAVALGAVAWRRAWPTRRRRLLQQVGTVAQLWIYPVKSCKGVPVSEAECTAMGLRSGNLRDRFWLVINQEGNMVTARQEPRLVLISLTCDGDTLTLSAAYTKDLLLPIKTPTTNAVHKCRVHGLEIEGRDCGEATAQWITSFLKSQPYRLVHFEPHMRPRRPHQIADLFRPKDQIAYSDTSPFLILSEASLADLNSRLEKKVKATNFRPNIVISGCDVYAEDSWDELLIGDVELKRVMACSRCILTTVDPDTGVMSRKEPLETLKRSHFPANRWAARRGAPLRPAALGRPVLRISRSH

SEQ ID NO: 4126 - protein, 567 aa, Homo sapiens
MSLVPATNYIYTPLNQLKGGTIVNVYGVVKFFKPPYLSKGTDYCSVVTIVDQTNVKLTCLLFSGNYEALPIIYKNGDIVRFHRLKIQVYKKETQGITSSGFASLTFEGTLGAPIIPRTSSKYFNFTTEDHKMVEALRVWASTHMSPSWTLLKLCDVQPMQYFDLTCQLLGKAEVDGASFLLKVWDGTRTPFPSWRVLIQDLVLEGDLSHIHRLQNLTIDILVYDNHVHVARSLKVGSFLRIYSLHTKLQSMNSENQTMLSLEFHLHGGTSYGRGIRVLPESNSDVDQLKKDLESANLTANQHSDVICQSEPDDSFPSSGSVSLYEVERCQQLSATILTDHQYLERTPLCAILKQKAPQQYRIRAKLRSYKPRRLFQSVKLHCPKCHLLQEVPHEGDLDIIFQDGATKTPDVKLQNTSLYDSKIWTTKNQKGRKVAVHFVKNNGILPLSNECLLLIEGGTLSEICKLSNKFNSVIPVRSGHEDLELLDLSAPFLIQGTIHHYGCKQCSSLRSIQNLNSLVDKTSWIPSSVAEAISAEDLCDQMHRGFHPHTKQAIPQQTPAGCPPVQF

SEQ ID NO: 4127 - protein, 317 aa, Homo sapiens
IDKDEEFAGSSPQSSKSTVVKSLIDNSSEIEDEDQILENSSQKENVFKCDSLKEECIPEHMVRGSKIMEAESQKATRECEKSALTPGFSDNAIMLFSPDFTLRNTLKSTSEDSLVKQECIKEVVEKREACHCEEVKMTVASEAKIQLSDSEAKSHSSADDASAWSNIQEAPLQDDSCLNNDIPHSIPLEQGSSCNGPGQTTGHPYYLRSFLVVLKTVLENEDDMLLFDEQEKGIVTKFYQLSATGQKLYVRLFQRKLSWIKMTKLEYEEIALDLTPVIEELTNAGFLQTEPKPWLDSQYESVKAPGLCFPASCYCFR

SEQ ID NO: 4128 - protein, 559 aa, Homo sapiens
MSLVPATNYIYTPLNQLKGGTIVNVYGVVKFFKPPYLSKGTDYCSVVTIVDQTNVKLTCLLFSGNYEALPIIYKNGDIVRFHRLKIQVYKKETQGITSSGFASLTFEGTLGAPIIPRTSSKYFNFTTEDHKMVEALRVWASTHMSPSWTLLKLCDVQPMQYFDLTCQLLGKAEVDGASFLLKVWDGTRTPFPSWRVLIQDLVLEGDLSHIHRLQNLTIDILVYDNHVHVARSLKVGSFLRIYSLHTKLQSMNSENQTMLSLEFHLHGGTSYGRGIRVLPESNSDVDQLKKDLESANLTANQHSDVICQSEPDDSFPSSGSVSLYEVERCQQLSATILTDHQYLERTPLCAILKQKAPQQYRIRAKLRSYKPRRLFQSVKLHCPKCHLLQEVPHEGDLDIIFQDGATKTPDVKLQNTSLYDSKIWTTKNQKGRKVAVHFVKNNGILPLSNECLLLIEALGIVPLQYVFVMTFTLDDGTGVLEAYLMDSDKFFQIPASEVLMDDDLQKSVDMIMDMFCPPGIKIDAYPWLECFIKSYNVTNGTDNQICYQIFDTTVAEDVI

SEQ ID NO: 4129 - protein, 5379 aa, Homo sapiens
MWPSYQDEHEFNAHLVCRMCCMDERDRVQKKTFTKWVNKHLMKVRKHINDLYEDLRDGHNLISLLEVLSGIKLPREKGRMRFHRLQNVQIALDFLKQRQVKLVNIRNDDITDGNPKLTLGLIWTIILHFQISDIYISGESGDMSAKEKLLLWTQKVTAGYTGIKCTNFSSCWSDGKMFNALIHRYRPDLVDMERVQIQSNRENLEQAFEVAERLGVTRLLDAEDVDVPSPDEKSVITYVSSIYDAFPKVPEGGEGISATEVDSRWQEYQSRVDSLIPWIKQHTILMSDKTFPQNPVELKALYNQYIHFKETEILAKEREKGRIEELYKLLEVWIEFGRIKLPQGYHPNDVEEEWGKLIIEMLEREKSLRPAVERLELLLQIANKIQNGALNCEEKLTLAKNTLQADAAHLESGQPVQCESDVIMYIQECEGLIRQLQVDLQILRDENYYQLEELAFRVMRLQDELVTLRLECTNLYRKGHFTSLELVPPSTLTTTHLKAEPLTKATHSSSTSWFRKPMTRAELVAISSSEDEGNLRFVYELLSWVEEMQMKLERAEWGNDLPSVELQLETQQHIHTSVEELGSSVKEARLYEGKMSQNFHTSYAETLGKLETQYCKLKETSSFRMRHLQSLHKFVSRATAELIWLNEKEEEELAYDWSDNNSNISAKRNYFSELTMELEEKQDVFRSLQDTAELLSLENHPAKQTVEAYSAAVQSQLQWMKQLCLCVEQHVKENTAYFQFFSDARELESFLRNLQDSIKRKYSCDHNTSLSRLEDLLQDSMDEKEQLIQSKSSVASLVGRSKTIVQLKPRSPDHVLKNTISVKAVCDYRQIEITICKNDECVLEDNSQRTKWKVISPTGNEAMVPSVCFLIPPPNKDAIEMASRVEQSYQKVMALWHQLHVNTKSLISWNYLRKDLDLVQTWNLEKLRSSAPGECHQIMKNLQAHYEDFLQDSRDSVLFSVADRLRLEEEVEACKARFQHLMKSMENEDKEETVAKMYISELKNIRLRLEEYEQRVVKRIQSLASSRTDRDAWQDNALRIAEQEHTQEDLQQLRSDLDAVSMKCDSFLHQSPSSSSVPTLRSELNLLVEKMDHVYGLSTVYLNKLKTVDVIVRSIQDAELLVKGYEIKLSQEEVVLADLSALEAHWSTLRHWLSDVKDKNSVFSVLDEEIAKAKVVAEQMSRLTPERNLDLERYQEKGSQLQERWHRVIAQLEIRQSELESIQEVLGDYRACHGTLIKWIEETTAQQEMMKPGQAEDSRVLSEQLSQQTALFAEIERNQTKLDQCQKFSQQYSTIVKDYELQLMTYKAFVESQQKSPGKRRRMLSSSDAITQEFMDLRTRYTALVTLTTQHVKYISDALRRLEEEEKVVEEEKQEHVEKVKELLGWVSTLARNTQGKATSSETKESTDIEKAILEQQVLSEELTTKKEQVSEAIKTSQIFLAKHGHKLSEKEKKQISEQLNALNKAYHDLCDGSANQLQQLQSQLAHQTEQKTLQKQQNTCHQQLEDLCSWVGQAERALAGHQGRTTQQDLSALQKNQSDLKDLQDDIQNRATSFATVVKDIEGFMEENQTKLSPRELTALREKLHQAKEQYEALQEETRVAQKELEEAVTSALQQETEKSKAAKELAENKKKIDALLDWVTSVGSSGGQLLTNLPGMEQLSGASLEKGALDTTDGYMGVNQAPEKLDKQCEMMKARHQELLSQQQNFILATQSAQAFLDQHGHNLTPEEQQMLQQKLGELKEQYSTSLAQSEAELKQVQTLQDELQKFLQDHKEFESWLERSEKELENMHKGGSSPETLPSLLKRQGSFSEDVISHKGDLRFVTISGQKVLDMENSFKEGKEPSEIGNLVKDKLKDATERYTALHSKCTRLGSHLNMLLGQYHQFQNSADSLQAWMQACEANVEKLLSDTVASDPGVLQEQLATTKQLQEELAEHQVPVEKLQKVARDIMEIEGEPAPDHRHVQETTDSILSHFQSLSYSLAERSSLLQKAIAQSQSVQESLESLLQSIGEVEQNLEGKQVSSLSSGVIQEALATNMKLKQDIARQKSSLEATREMVTRFMETADSTTAAVLQGKLAEVSQRFEQLCLQQQEKESSLKKLLPQAEMFEHLSGKLQQFMENKSRMLASGNQPDQDITHFFQQIQELNLEMEDQQENLDTLEHLVTELSSCGFALDLCQHQDRVQNLRKDFTELQKTVKEREKDASSCQEQLDEFRKLVRTFQKWLKETEGSIPPTETSMSAKELEKQIEHLKSLLDDWASKGTLVEEINCKGTSLENLIMEITAPDSQGKTGSILPSVGSSVGSVNGYHTCKDLTEIQCDMSDVNLKYEKLGGVLHERQESLQAILNRMEEVHKEANSVLQWLESKEEVLKSMDAMSSPTKTETVKAQAESNKAFLAELEQNSPKIQKVKEALAGLLVTYPNSQEAENWKKIQEELNSRWERATEVTVARQRQLEESASHLACFQAAESQLRPWLMEKELMMGVLGPLSIDPNMLNAQKQQVQFMLKEFEARRQQHEQLNEAAQGILTGPGDVSLSTSQVQKELQSINQKWVELTDKLNSRSSQIDQAIVKSTQYQELLQDLSEKVRAVGQRLSVQSAISTQPEAVKQQLEETSEIRSDLEQLDHEVKEAQTLCDELSVLIGEQYLKDELKKRLETVALPLQGLEDLAADRINRLQAALASTQQFQQMFDELRTWLDDKQSQQAKNCPISAKLERLQSQLQENEEFQKSLNQHSGSYEVIVAEGESLLLSVPPGEEKRTLQNQLVELKNHWEELSKKTADRQSRLKDCMQKAQKYQWHVEDLVPWIEDCKAKMSELRVTLDPVQLESSLLRSKAMLNEVEKRRSLLEILNSAADILINSSEADEDGIRDEKAGINQNMDAVTEELQAKTGSLEEMTQRLREFQESFKNIEKKVEGAKHQLEIFDALGSQACSNKNLEKLRAQQEVLQALEPQVDYLRNFTQGLVEDAPDGSDASQLLHQAEVAQQEFLEVKQRVNSGCVMMENKLEGIGQFHCRVREMFSQLADLDDELDGMGAIGRDTDSLQSQIEDVRLFLNKIHVLKLDIEASEAECRHMLEEEGTLDLLGLKRELEALNKQCGKLTERGKARQEQLELTLGRVEDFYRKLKGLNDATTAAEEAEALQWVVGTEVEIINQQLADFKMFQKEQVDPLQMKLQQVNGLGQGLIQSAGKDCDVQGLEHDMEEINARWNTLNKKVAQRIAQLQEALLHCGKFQDALEPLLSWLADTEELIANQKPPSAEYKVVKAQIQEQKLLQRLLDDRKATVDMLQAEGGRIAQSAELADREKITGQLESLESRWTELLSKAAARQKQLEDILVLAKQFHETAEPISDFLSVTEKKLANSEPVGTQTAKIQQQIIRHKALEEDIENHATDVHQAVKIGQSLSSLTSPAEQGVLSEKIDSLQARYSEIQDRCCRKAALLDQALSNARLFGEDEVEVLNWLAEVEDKLSSVFVKDFKQDVLHRQHADHLALNEEIVNRKKNVDQAIKNGQALLKQTTGEEVLLIQEKLDGIKTRYADITVTSSKALRTLEQARQLATKFQSTYEELTGWLREVEEELATSGGQSPTGEQIPQFQQRQKELKKEVMEHRLVLDTVNEVSRALLELVPWRAREGLDKLVSDANEQYKLVSDTIGQRVDEIDAAIQRSQQYEQAADAELAWVAETKRKLMALGPIRLEQDQTTAQLQVQKAFSIDIIRHKDSMDELFSHRSEIFGTCGEEQKTVLQEKTESLIQQYEAISLLNSERYARLERAQVLVNQFWETYEELSPWIEETRALIAQLPSPAIDHEQLRQQQEEMRQLRESIAEHKPHIDKLLKIGPQLKELNPEEGEMVEEKYQKAENMYAQIKEEVRQRALALDEAVSQSTQITEFHDKIEPMLETLENLSSRLRMPPLIPAEVDKIRECISDNKSATVELEKLQPSFEALKRRGEELIGRSQGADKDLAAKEIQDKLDQMVFFWEDIKARAEEREIKFLDVLELAEKFWYDMAALLTTIKDTQDIVHDLESPGIDPSIIKQQVEAAETIKEETDGLHEELEFIRILGADLIFACGETEKPEVRKSIDEMNNAWENLNKTWKERLEKLEDAMQAAVQYQDTLQAMFDWLDNTVIKLCTMPPVGTDLNTVKDQLNEMKEFKVEVYQQQIEMEKLNHQGELMLKKATDETDRDIIREPLTELKHLWENLGEKIAHRQHKLEGALLALGQFQHALEELMSWLTHTEELLDAQRPISGDPKVIEVELAKHHVLKNDVLAHQATVETVNKAGNELLESSAGDDASSLRSRLEAMNQCWESVLQKTEEREQQLQSTLQQAQGFHSEIEDFLLELTRMESQLSASKPTGGLPETAREQLDTHMELYSQLKAKEETYNQLLDKGRLMLLSRDDSGSGSKTEQSVALLEQKWHVVSSKMEERKSKLEEALNLATEFQNSLQEFINWLTLAEQSLNIASPPSLILNTVLSQIEEHKVFANEVNAHRDQIIELDQTGNQLKFLSQKQDVVLIKNLLVSVQSRWEKVVQRSIERGRSLDDARKRAKQFHEAWKKLIDWLEDAESHLDSELEISNDPDKIKLQLSKHKEFQKTLGGKQPVYDTTIRTGRALKEKTLLPEDSQKLDNFLGEVRDKWDTVCGKSVERQHKLEEALLFSGQFMDALQALVDWLYKVEPQLAEDQPVHGDLDLVMNLMDAHKVFQKELGKRTGTVQVLKRSGRELIENSRDDTTWVKGQLQELSTRWDTVCKLSVSKQSRLEQALKQAEVFRDTVHMLLEWLSEAEQTLRFRGALPDDTEALQSLIDTHKEFMKKVEEKRVDVNSAVAMGEVILAVCHPDCITTIKHWITIIRARFEEVLTWAKQHQQRLETALSELVANAELLEELLAWIQWAETTLIQRDQEPIPQNIDRVKALIAEHQTFMEEMTRKQPDVDRVTKTYKRKNIEPTHAPFIEKSRSGGRKSLSQPTPPPMPILSQSEAKNPRINQLSARWQQVWLLALERQRKLNDALDRLEELKEFANFDFDVWRKKYMRWMNHKKSRVMDFFRRIDKDQDGKITRQEFIDGILASKFPTTKLEMTAVADIFDRDGDGYIDYYEFVAALHPNKDAYRPTTDADKIEDEVTRQVAQCKCAKRFQVEQIGENKYRFGDSQQLRLVRILRSTVMVRVGGGWMALDEFLVKNDPCRARGRTNIELREKFILPEGASQGMTPFRSRGRRSKPSSRAASPTRSSSSASQSNHSCTSMPSSPATPASGTKVIPSSGSKLKRPTPTFHSSRTSLAGDTSNSSSPASTGAKTNRADPKKSASRPGSRAGSRAGSRASSRRGSDASDFDLLETQSACSDTSESSAAGGQGNSRRGLNKPSKIPTMSKKTTTASPRTPGPKR

SEQ ID NO: 4130 - protein, 573 aa, Homo sapiens
MMSEGKPPDKKRPRRSLSISKNKKKASNSIISCFNNAPPAKLACPVCSKMVPRYDLNRHLDEMCANNDFVQVDPGQVGLINSNVSMVDLTSVTLEDVTPKKSPPPKTNLTPGQSDSAKREVKQKISPYFKSNDVVCKNQDELRNRSVKVICLGSLASKLSRKYVKAKKSIDKDEEFAGSSPQSSKSTVVKSLIDNSSEIEDEDQILENSSQKENVFKCDSLKEECIPEHMVRGSKIMEAESQKATRECEKSALTPGFSDNAIMLFSPDFTLRNTLKSTSEDSLVKQECIKEVVEKREACHCEEVKMTVASEAKIQLSDSEAKSHSSADDASAWSNIQEAPLQDDSCLNNDIPHSIPLEQGSSCNGPGQTTGHPYYLRSFLVVLKTVLENEDDMLLFDEQEKGIVTKFYQLSATGQKLYVRLFQRKLSWIKMTKLEYEEIALDLTPVIEELTNAGFLQTESELQELSEVLELLSAPELKSLAKTFHLVNPNGQKQQLVDAFLKLAKQRSVCTWGKNKPGIGAVILKRLEAVSTGASPGLCVEVDEMGTLGQSVDEWLSVQWWCDRNPTPSPSTP

SEQ ID NO: 4131 - protein, 1964 aa, Homo sapiens
MEFPIGSLETNNFRRFTPESLVEIEKQIAAKQGTKKAREKHREQKDQEEKPRPQLDLKACNQLPKFYGELPAELIGEPLEDLDPFYSTHRTFMVLNKGRTISRFSATRALWLFSPFNLIRRTAIKVSVHSWFSLFITVTILVNCVCMTRTDLPEKIEYVFTVIYTFEALIKILARGFCLNEFTYLRDPWNWLDFSVITLAYVGTAIDLRGISGLRTFRVLRALKTVSVIPGLKVIVGALIHSVKKLADVTILTIFCLSVFALVGLQLFKGNLKNKCVKNDMAVNETTNYSSHRKREWSLFHRDQDIYINKRGTSDPLLCGNGSDSGHCPDGYICLKTSDNPDFNYTSFDSFAWAFLSLFRLMTQDSWERLYQQTLRTSGKIYMIFFVLVIFLGSFYLVNLILAVVTMAYEEQNQATTDEIEAKEKKFQEALEMLRKEQEVLAALGIDTTSLHSHNGSPLTSKNASERRHRIKPRVSEGSTEDNKSPRSDPYNQRRMSFLGLASGKRRASHGSVFHFRSPGRDISLPEGVTDDGVFPGDHESHRGSLLLGGGAGQQGPLPRSPLPQPSNPDSRHGEDEHQPPPTSELAPGAVDVSAFDAGQKKTFLSAEYLDEPFRAQRAMSVVSIITSVLEELEESEQKCPPCLTSLSQKYLIWDCCPMWVKLKTILFGLVTDPFAELTITLCIVVNTIFMAMEHHGMSPTFEAMLQIGNIVFTIFFTAEMVFKIIAFDPYYYFQKKWNIFDCIIVTVSLLELGVAKKGSLSVLRSFRLLRVFKLAKSWPTLNTLIKIIGNSVGALGNLTIILAIIVFVFALVGKQLLGENYRNNRKNISAPHEDWPRWHMHDFFHSFLIVFRILCGEWIENMWACMEVGQKSICLILFLTVMVLGNLVVLNLFIALLLNSFSADNLTAPEDDGEVNNLQVALARIQVFGHRTKQALCSFFSRSCPFPQPKAEPELVVKLPLSSSKAENHIAANTARGSSGGLQAPRGPRDEHSDFIANPTVWVSVPIAEGESDLDDLEDDGGEDAQSFQQEVIPKGQEQLQQVERCGDHLTPRSPGTGTSSEDLAPSLGETWKDESVPQVPAEGVDDTSSSEGSTVDCLDPEEILRKIPELADDLEEPDDCFTEGCIRHCPCCKLDTTKSPWDVGWQVRKTCYRIVEHSWFESFIIFMILLSSGSLAFEDYYLDQKPTVKALLEYTDRVFTFIFVFEMLLKWVAYGFKKYFTNAWCWLDFLIVNISLISLTAKILEYSEVAPIKALRTLRALRPLRALSRFEGMRVVVDALVGAIPSIMNVLLVCLIFWLIFSIMGVNLFAGKFWRCINYTDGEFSLVPLSIVNNKSDCKIQNSTGSFFWVNVKVNFDNVAMGYLALLQVATFKGWMDIMYAAVDSREVNMQPKWEDNVYMYLYFVIFIIFGGFFTLNLFVGVIIDNFNQQKKKLGGQDIFMTEEQKKYYNAMKKLGSKKPQKPIPRPLNKFQGFVFDIVTRQAFDITIMVLICLNMITMMVETDDQSEEKTKILGKINQFFVAVFTGECVMKMFALRQYYFTNGWNVFDFIVVVLSIASLIFSAILKSLQSYFSPTLFRVIRLARIGRILRLIRAAKGIRTLLFALMMSLPALFNIGLLLFLVMFIYSIFGMSSFPHVRWEAGIDDMFNFQTFANSMLCLFQITTSAGWDGLLSPILNTGPPYCDPNLPNSNGTRGDCGSPAVGIIFFTTYIIISFLIMVNMYIAVILENFNVATEESTEPLSEDDFDMFYETWEKFDPEATQFITFSALSDFADTLSGPLRIPKPNRNILIQMDLPLVPGDKIHCLDILFAFTKNVLGESGELDSLKANMEEKFMATNLSKSSYEPIATTLRWKQEDISATVIQKAYRSYVLHRSMALSNTPCVPRAEEEAASLPDEGFVAFTANENCVLPDKSETASATSFPPSYESVTRGLSDRVNMRTSSSIQNEDEATSMELIAPGP

SEQ ID NO: 4132 - protein, 509 aa, Homo sapiens
MSLVPATNYIYTPLNQLKGGTIVNVYGVVKFFKPPYLSKGTDYCSVVTIVDQTNVKLTCLLFSGNYEALPIIYKNGDIVRFHRLKIQVYKKETQGITSSGFASLTFEGTLGAPIIPRTSSKYFNFTTEDHKMVEALRVWASTHMSPSWTLLKLCDVQPMQYFDLTCQLLGKAEVDGASFLLKVWDGTRTPFPSWRVLIQDLVLEGDLSHIHRLQNLTIDILVYDNHVHVARSLKVGSFLRIYSLHTKLQSMNSENQTMLSLEFHLHGGTSYGRGIRVLPESNSDVDQLKKDLESANLTANQHSDVICQSEPDDSFPSSGSVSLYEVERCQQLSATILTDHQYLERTPLCAILKQKAPQQYRIRAKLRSYKPRRLFQSVKLHCPKCHLLQEVPHEGDLDIIFQDGATKTPDVKLQNTSLYDSKIWTTKNQKGRKVAVHFVKNNGILPLSNECLLLIEGGTLSEICKLSNKFNSVIPVRSGHEDLELLDLSAPFLIQGTIHHYGNQRRRLM

SEQ ID NO: 4133 - protein, 1086 aa, Homo sapiens
MVEKRCPLQRDGVYRWFSELPSPQRVEFLCGLLDLCIPLELRFLGSCLEDLARKDYHSLRDSEIKANNPADLGSLTNLTDEVVRSKLLVSLALLGSEQREAAGVLYRTLTHIDSIIHNYGLQLNEGRTGDEFLLLFTMASNHPAFSFHQKQVLRQELTQIQSSLNGGGGHGGKGAPGPGGALPTCPACHKITPRTEAPVSSVSNSLENALHTSAHSTEESLPKRPLGKHSKVSVEKIDLKGLSHTKNDRNVECSFEVLWSDSSITSVTKSSSEVTEFISKLCQLYPEENLEKLIPCLAGPDAFYVERNHVDLDSGLRYLASLPSHVLKNDHVRRFLSTSSPPQQLQSPSPGNPSLSKVGTVMGVSGRPVCGVAGIPSSQSGAQHHGQHPAGSAAPLPHCSHAGSAGSALAYRTQMDTSPAILMPSSLQTPQTQEQNGILDWLRKLRLHKYYPVFKQLSMEKFLSLTEEDLNKFESLTMGAKKKLKTQLELEKEKSERRCLNPSAPPLVTSSGVARVPPTSHVGPVQSGRGSHAAELRVEVEQPHHQLPREGSSSEYSSSSSSPMGVQAREESSDSAEENDRRVEIHLESSDKEKPVMLLNHFTSSSARPTAQVLPVQNEASSNPSGHHPLPPQMLSAASHITPIRMLNSVHKPERGSADMKLLSSSVHSLLSLEERNKGSGPRSSMKVDKSFGSAMMDVLPASAPHQPVQVLSGLSESSSMSPTVSFGPRTKVVHASTLDRVLKTAQQPALVVETSTAATGTPSTVLHAARPPIKLLLSSSVPADSAISGQTSCPNNVQISVPPAIINPRTALYTANTKVAFSAMSSMPVGPLQGGFCANSNTASPSSHPSTSFANMATLPSCPAPSSSPALSSVPESSFYSSSGGGGSTGNIPASNPNHHHHHHHQQPPAPPQPAPPPPGCIVCTSCGCSGSCGSSGLTVSYANYFQHPFSGPSVFTFPFLPFSPMCSSGYVSAQQYGGGSTFPVVHAPYSSSGTPDPVLSGQSTFAVPPMQNFMAGTAGVYQTQGLVGSSNGSSHKKSGNLSCYNCGATGHRAQDCKQPSMDFNRPGTFRLKYAPPAESLDSTD

SEQ ID NO: 4134 - protein, 1027 aa, Homo sapiens
MANLLKTVVTGCSCPLLSNLGSCKGLRVKKDFLRTFYTHQELWCKAPVKPGIPYKQLTVGVPKEIFQNEKRVALSPAGVQNLVKQGFNVVVESGAGEASKFSDDHYRVAGAQIQGAKEVLASDLVVKVRAPMVNPTLGVHEADLLKTSGTLISFIYPAQNPELLNKLSQRKTTVLAMDQVPRVTIAQGYDALSSMANIAGAAALEQFKSLGAEPLEVDLKESGEGQGGYAKEMSKEFIEAEMKLFAQQCKEVDILISTALIPGKKAPVLFNKEMIESMKEGSVVVDLAAEAGGNFETTKPGELYIHKGITHIGYTDLPSRMATQASTLYSNNITKLLKAISPDKDNFYFDVKDDFDFGTMGHVIRGTVVMKDGKVIFPAPTPKNIPQGAPVKQKTVAELEAEKAATITPFRKTMSTASAYTAGLTGILGLGIAAPNLAFSQMVTTFGLAGIVGYHTVWGVTPALHSPLMSVTNAISGLTAVGGLALMGGHLYPSTTSQGLAALAAFISSVNIAGGFLVTQRMLDMFKRPTDPPEYNYLYLLPAGTFVGGYLAALYSGYNIEQIMYLGSGLCCVGALAGLSTQGTARLGNALGMIGVAGGLAATLGVLKPGPELLAQMSGAMALGGTIGLTIAKRIQISDLPQLVAAFHSLVGLAAVLTCIAEYIIEYPHFATDAAANLTKIVAYLGTYIGGVTFSGSLIAYGKLQGLLKSAPLLLPGRHLLNAGLLAASVGGIIPFMVDPSFTTGITCLGSVSALSAVMGVTLTAAIGGADMPVVITVLNSYSGWALCAEGFLLNNNLLTIVGALIGSSGAILSYIMCVAMNRSLANVILGGYGTTSTAGGKPMEISGTHTEINLDNAIDMIREANSIIITPGYGLCAAKAQYPIADLVKMLTEQGKKVRFGIHPVAGRMPGQLNVLLAEAGVPYDIVLEMDEINHDFPDTDLVLVIGANDTVNSAAQEDPNSIIAGMPVLEVWKSKQVIVMKRSLGVGYAAVDNPIFYKPNTAMLLGDAKKTCDALQAKVRESYQK

SEQ ID NO: 4135 - protein, 298 aa, Homo sapiens
MTKLEYEEIALDLTPVIEELTNAGFLQTESELQELSEVLELLSAPELKSLAKTFHLVNPNGQKQQLVDAFLKLAKQRSVCTWGKNKPGIGAVILKRAKALAGQSVRICKGPRAVFSRILLLFSLTDSMEDEDAACGGQGQLSTVLLVNLGRMEFPSYTINRKTHIFQDRDDLIRYAAATHMLSDISSAMANGNWEEAKELAQCAKRDWNRLKNHPSLRCHEDLPLFLRCFTVGWIYTRILSRFVEILQRLHMYEEAVRELESLLSQRIYCPDSRGRWWDRLALNLHQHLKRLEPEPDV

SEQ ID NO: 4136 - protein, 587 aa, Homo sapiens
MTKLEYEEIALDLTPVIEELTNAGFLQTESELQELSEVLELLSAPELKSLAKTFHLVNPNGQKQQLVDAFLKLAKQRSVCTWGKNKPGIGAVILKRAKALAGQSVRICKGPRAVFSRILLLFSLTDSMEDEDAACGGQGQLSTVLLVNLGRMEFPSYTINRKTHIFQDRDDLIRYAAATHMLSDISSAMANGNWEEAKELAQCAKRDWNRLKNHPSLRCHEDLPLFLRCFTVGWIYTRILSRFVEILQRLHMYEEAVRELESLLSQRIYCPDSRGRWWDRLALNLHQHLKRLEPTIKCITEGLADPEVRTGHRLSLYQRAVRLRESPSCKKFKHLFQQLPEMAVQDVKHVTITGRLCPQRGMCKSVFVMEAGEAADPTTVLCSVEELALAHYRRSGFDQGIHGEGSTFSTLYGLLLWDIIFMDGIPDVFRNACQAFPLDLCTDSFFTSRRPALEARLQLIHDAPEESLRAWVAATWHEQEGRVASLVSWDRFTSLQQAQDLVSCLGGPVLSGVCRHLAADFRHCRGGLPDLVVWNSQSRHFKLVEVKGPNDRLSHKQMIWLAELQKLGAEVEVCHVVAVGAKSQSLS

SEQ ID NO: 4137 - protein, 456 aa, Homo sapiens
MLDDRARMEAAKKEKVEQILAEFQLQEEDLKKVMRRMQKEMDRGLRLETHEEASVKMLPTYVRSTPEGSEVGDFLSLDLGGTNFRVMLVKVGEGEEGQWSVKTKHQMYSIPEDAMTGTAEMLFDYISECISDFLDKHQMKHKKLPLGFTFSFPVRHEDIDKGILLNWTKGFKASGAEGNNVVGLLRDAIKRRGDFEMDVVAMVNDTVATMISCYYEDHQCEVGMIVGTGCNACYMEEMQNVELVEGDEGRMCVNTEWGAFGDSGELDEFLLEYDRLVDESSANPGQQLYEKLIGGKYMGELVRLVLLRLVDENLLFHGEASEQLRTRGAFETRFVSQVESDTGDRKQIYNILSTLGLRPSTTDCDIVRRACESVSTRAAHMCSAGLAGVINRMRESRSEDVMRITVGVDGSVYKLHPSFKERFHASVRRLTPSCEITFIESEEGSGRGAALVSAVA

SEQ ID NO: 4138 - protein, 2146 aa, Homo sapiens
MNAYKYQKFLEGLNNLRDERDRVQKKTFTKWVNKHLMKVRKHINDLYEDLRDGHNLISLLEVLSGIKLPREKGRMRFHRLQNVQIALDFLKQRQVKLVNIRNDDITDGNPKLTLGLIWTIILHFQISDIYISGESGDMSAKEKLLLWTQKVTAGYTGIKCTNFSSCWSDGKMFNALIHRYRPDLVDMERVQIQSNRENLEQAFEVAERLGVTRLLDAEDVDVPSPDEKSVITYVSSIYDAFPKVPEGGEGISATEVDSRWQEYQSRVDSLIPWIKQHTILMSDKTFPQNPVELKALYNQYIHFKETEILAKEREKGRIEELYKLLEVWIEFGRIKLPQGYHPNDVEEEWGKLIIEMLEREKSLRPAVERLELLLQIANKIQNGALNCEEKLTLAKNTLQADAAHLESGQPVQCESDVIMYIQECEGLIRQLQVDLQILRDENYYQLEELAFRVMRLQDELVTLRLECTNLYRKGHFTSLELVPPSTLTTTHLKAEPLTKATHSSSTSWFRKPMTRAELVAISSSEDEGNLRFVYELLSWVEEMQMKLERAEWGNDLPSVELQLETQQHIHTSVEELGSSVKEARLYEGKMSQNFHTSYAETLGKLETQYCKLKETSSFRMRHLQSLHKFVSRATAELIWLNEKEEEELAYDWSDNNSNISAKRNYFSELTMELEEKQDVFRSLQDTAELLSLENHPAKQTVEAYSAAVQSQLQWMKQLCLCVEQHVKENTAYFQFFSDARELESFLRNLQDSIKRKYSCDHNTSLSRLEDLLQDSMDEKEQLIQSKSSVASLVGRSKTIVQLKPRSPDHVLKNTISVKAVCDYRQIEITICKNDECVLEDNSQRTKWKVISPTGNEAMVPSVCFLIPPPNKDAIEMASRVEQSYQKVMALWHQLHVNTKSLISWNYLRKDLDLVQTWNLEKLRSSAPGECHQIMKNLQAHYEDFLQDSRDSVLFSVADRLRLEEEVEACKARFQHLMKSMENEDKEETVAKMYISELKNIRLRLEEYEQRVVKRIQSLASSRTDRDAWQDNALRIAEQEHTQEDLQQLRSDLDAVSMKCDSFLHQSPSSSSVPTLRSELNLLVEKMDHVYGLSTVYLNKLKTVDVIVRSIQDAELLVKGYEIKLSQEEVVLADLSALEAHWSTLRHWLSDVKDKNSVFSVLDEEIAKAKVVAEQMSRLTPERNLDLERYQEKGSQLQERWHRVIAQLEIRQSELESIQEVLGDYRACHGTLIKWIEETTAQQEMMKPGQAEDSRVLSEQLSQQTALFAEIERNQTKLDQCQKFSQQYSTIVKDYELQLMTYKAFVESQQKSPGKRRRMLSSSDAITQEFMDLRTRYTALVTLTTQHVKYISDALRRLEEEEKVVEEEKQEHVEKVKELLGWVSTLARNTQGKATSSETKESTDIEKAILEQQVLSEELTTKKEQVSEAIKTSQIFLAKHGHKLSEKEKKQISEQLNALNKAYHDLCDGSANQLQQLQSQLAHQTEQKECRAVAGVIDLGTVEIFPIFKAMQKGLLDQDTGLVLLESQVIMSGLIAPETGENLSLEEGIARNLINPQMYQQLRELQDALALISRLTESRGPLSVVEAIEKRIISETVGLKILEAHLATGGFSLSPSENCINLEEAFHQGLISAWLHSVLESYLRTSKNLIDPNTAEKIGLLDLMQRCIVHQESGFKLLPVKQLAGGMVSLKSGRKVSIFRAVQEGLIDRQVTVRLLEAQLFAGGIVDPRTGHRLTVEEAVRHNLIDQDMACAILIRQLQTGGIIDTVTGQRLTIDEAVSNDLVAAKIALVILESLWSFMGLLWPESGEILPITDALEQGIVSTELAHKILSNRQHIKALFLPATTEILSWKKAIESGILDRDLANNLKSICIPDVMPHMQLADSAEQNINPGAAVLPCSKSHPKATASQSENLLFQLMTHSYINVQNGQRLLLLDKELMETLTSRDEYQTSPPKVVEIGHQRQKTPEGLQESANVKISGTFSSGWTVRLPEFQFSSQNKEYPDREDCTTEKGKKTTVETEDSSVENPEQDLFVEQKERNPNIDALKVINKVKLEVQRQLIGTQREDQTAVSVRENASRGHLLTIPPAEAEGVPLVVDKDVFSVETPKKEHQPLRNTSFTCQNEQAHTLETEYIHDETGGSHIKPQSK

SEQ ID NO: 4139 - protein, 289 aa, Homo sapiens
MDVGFSGLPDVSQSHSKTLWGARGRGPSIRRQREFMPEEKKDTVYWEKRRKNNEAAKRSREKRRLNDAAIEGRLAALMEENALLKGELKALKLRFGLLPLTGGPRALPLQALLLEAPWTGDPRPGAEALSSLSGSHSCLLRPRSLDAGIPGCRGCLLAPRWTGLATSPRSPQESASPTLNRIDMALQTALPPALFSCHLLEGHVGSRPELRPCWGLWSPVPSGCRASGPSDVLLTPTADPMGLSPGVTCPAPGNSPEGLGQPSLPHKLRIKSRASGRVPRGWEGGQAPL

SEQ ID NO: 4140 - protein, 736 aa, Homo sapiens
MSKLGISFSEDQQKEKDQLGKAPKKEEAAALRKDISGSDKRSLEKNQINFWRNQMTKRWEPSLNWKTTVNYKGKGSAKEIQEDKHTGKLEKPRPSVSHGRAQLLRKSAEKIEETVSDSSSESEEDEEPPDHRQEASADLPSEYWQIQKLVKYLKGGNQTATVIALCSMRDFSLAQETCQLAIRDVGGLEVLINLLETDEVKCKIGSLKILKEISHNPQIRQNIVDLGGLPIMVNILDSPHKSLKCLAAETIANVAKFKRARRVVRQHGGITKLVALLDCAHDSTKPAQSSLYEARDVEVARCGALALWSCSKSHTNKEAIRKAGGIPLLARLLKTSHENMLIPVVGTLQECASEENYRAAIKAERIIENLVKNLNSENEQLQEHCAMAIYQCAEDKETRDLVRLHGGLKPLASLLNNTDNKERLAAVTGAIWKCSISKENVTKFREYKAIETLVGLLTDQPEEVLVNVVGALGECCQERENRVIVRKCGGIQPLVNLLVGINQALLVNVTKAVGACAVEPESMMIIDRLDGVRLLWSLLKNPHPDVKASAAWALCPCIKNAKDAGEMVRSFVGGLELIVNLLKSDNKEVLASVCAAITNIAKDQENLAVITDHGVVPLLSKLANTNNNKLRHHLAEAISRCCMWGRNRVAFGEHKAVAPLVRYLKSNDTNVHRATAQALYQLSEDADNCITMHENGAVKLLLDMVGSPDQDLQEAAAGCISNIRRLALATEKARYT

SEQ ID NO: 4141 - protein, 346 aa, Homo sapiens
SSSSVSSSSATAPSSVVAATSGGGRPGLGRGRNSNKGLPQSTISFDGIYANMRMVHILTSVVGSKCEVQVKNGGIYEGVFKTYSPKCDLVLDAAHEKSTESSSGPKREEIMESILFKCSDFVVVQFKDMDSSYAKRDAFTDSAISAKVNGEHKEKDLEPWDAGELTANEELEALENDVSNGWDPNDMFRYNEENYGVVSTYDSSLSSYTVPLERDNSEEFLKREARANQLAEEIESSAQYKARVALENDDRSEEEKYTAVQRNSSEREGHSINTRYLKEIMMQYFGYTTQGKINIFLLDKEIEKSYPGEVGDRIHRVWASLDRAPCHQDPLLTLQISTRILVQTKE

SEQ ID NO: 4142 - protein, 535 aa, Homo sapiens
MLHLHHSWTPNIDRLAEDGVKLTQHISAASLCTPSRAAFLTGRYPVRSGMVSSIGYRVLQWTGASGGLPTNETTFAKILKEKGYATGLIGKWHLGLNCESASDHCHHPLHHGFDHFYGMPFSLMGDCARWELSEKRVNLEQKLNFLFQVLALVALTLVAGKLTHLIPVSWMPVIWSALSAVLLLASSYFVGALIVHADCFLMRNHTITEQPMCFQRTTPLILQEVASFLKRNKHGPFLLFVSFLHVHIPLITMENFLGKSLHGLYGDNVEEMDWMVGRILDTLDVEGLSNSTLIYFTSDHGGSLENQLGNTQYGGWNGIYKGGKGMGGWEGGIRVPGIFRWPGVLPAGRVIGEPTSLMDVFPTVVRLAGGEVPQDRVIDGQDLLPLLLGTAQHSDHEFLMHYCERFLHAARWHQRDRGTMWKVHFVTPVFQPEGAGACYGRKVCPCFGEKVVHHDPPLLFDLSRDPSETHILTPASEPVFYQVMERVQQAVWEHQRTLSPVPLQLDRLGNIWRPWLQPCCGPFPLCWCLREDDPQ

SEQ ID NO: 4143 - protein, 612 aa, Homo sapiens
MRDFSLAQETCQLAIRDVGGLEVLINLLETDEVKCKIGSLKILKEISHNPQIRQNIVDLGGLPIMVNILDSPHKSLKCLAAETIANVAKFKRARRVVRQHGGITKLVALLDCAHDSTKPAQSSLYEARDVEVARCGALALWSCSKSHTNKEAIRKAGGIPLLARLLKTSHENMLIPVVGTLQECASEENYRAAIKAERIIENLVKNLNSENEQLQEHCAMAIYQCAEDKETRDLVRLHGGLKPLASLLNNTDNKERLAAVTGAIWKCSISKENVTKFREYKAIETLVGLLTDQPEEVLVNVVGALGECCQERENRVIVRKCGGIQPLVNLLVGINQALLVNVTKAVGACAVEPESMMIIDRLDGVRLLWSLLKNPHPDVKASAAWALCPCIKNAKDAGEMVRSFVGGLELIVNLLKSDNKEVLASVCAAITNIAKDQENLAVITDHGVVPLLSKLANTNNNKLRHHLAEAISRCCMWGRNRVAFGEHKAVAPLVRYLKSNDTNVHRATAQALYQLSEDADNCITMHENGAVKTESRHVARLECSDNDLGSLQPPPPGFKRFSCLSLLSSWDYSFYWIWLGPLTRISRKLQLVVYPISAGWLLLQRRQDTLEI

SEQ ID NO: 4144 - protein, 459 aa, Homo sapiens
METFDPTELPELLKLYYRRLFPYSQYYRWLNYGGVIKNYFQHREFSFTLKDDIYIRYQSFNNQSDLEKEMQKMNPYKIDIGAVYSHRPNQHNTVKLGAFQAQEKELVFDIDMTDYDDVRRCCSSADICPKCWTLMTMAIRIIDRALKEDFGFKHRLWVYSGRRGVHCWVCDESVRKLSSAVRSGIVEYLSLVKGGQDVKKKVHLSEKIHPFIRKSINIIKKYFEEYALVNQDILENKESWDKILALVPETIHDELQQSFQKSHNSLQRWEHLKKVASRYQNNIKNDKYGPWLEWEIMLQYCFPRLDINVSKGINHLLKSPFSVHPKTESHSVTQAGVQWRDLGSLQPLPSRFKQFSASPSQVAGITGRISVPIDLQKVDQFDPFTVPTISFICRELDAISTNEEEKEENEAESDVKHRTRDYKKTSLAPYVKVFEHFLENLDKSRKGELLKKSDLQKDF

SEQ ID NO: 4145 - protein, 486 aa, Homo sapiens
MLDDRARMEAAKKEKVEQILAEFQLQEEDLKKVMRRMQKEMDRGLRLETHEEASVKMLPTYVRSTPEGSEVGDFLSLDLGGTNFRVMLVKVGEGEEGQWSVKTKHQMYSIPEDAMTGTAEMLFDYISECISDFLDKHQMKHKKLPLGFTFSFPVRHEDIDKGILLNWTKGFKASGAEGNNVVGLLRDAIKRRGDFEMDVVAMVNDTVATMISCYYEDHQCEVGMIVGTGCNACYMEEMQNVELVEGDEGRMCVNTEWGAFGDSGELDEFLLEYDRLVDESSANPGDRACRGGSETPPARFLGLTQHSPKYEKLIGGKYMGELVRLVLLRLVDENLLFHGEASEQLRTRGAFETRFVSQVESDTGDRKQIYNILSTLGLRPSTTDCDIVRRACESVSTRAAHMCSAGLAGVINRMRESRSEDVMRITVGVDGSVYKLHPSFKERFHASVRRLTPSCEITFIESEEGSGRGAALVSAVACKKACMLGQ

SEQ ID NO: 4146 - protein, 280 aa, Homo sapiens
MNELNISSLQIATRNGHASLVNFLLSENVDLHQKVEPKESPLHLVVINNHITVVNSLLSAQHDIDILNQKQQTPLHVAADRGNVELVETLLKAGCDLKAVDKQGKTALAVASRSNHSLVVGMLIKAERYYAWREEHHESIRDPSTGFTLTFKQDHSLETRHIRTLLWDLAYHQLKANEWQRLARSWNFTDDQIRAIEEQWSGNESFREHGHRALLIWLHGTLMTQGDPAKQLYEELVHAGFPKLAAHFAKEKSSFESYFCIIKIYCKQWNDHIKKYYQLL

SEQ ID NO: 4147 - protein, 1065 aa, Homo sapiens
MSLKPQQQQQQQQQQQQQQQQQQQQQQQPPPAAANVRKPGGSGLLASPAAAPSPSSSSVSSSSATAPSSVVAATSGGGRPGLGRGRNSNKGLPQSTISFDGIYANMRMVHILTSVVGSKCEVQVKNGGIYEGVFKTYSPKCDLVLDAAHEKSTESSSGPKREEIMESILFKCSDFVVVQFKDMDSSYAKRDAFTDSAISAKVNGEHKEKDLEPWDAGELTANEELEALENDVSNGWDPNDMFRYNEENYGVVSTYDSSLSSYTVPLERDNSEEFLKREARANQLAEEIESSAQYKARVALENDDRSEEEKYTAVQRNSSEREGHSINTRENKYIPPGQRNREVISWGSGRQNSPRMGQPGSGSMPSRSTSHTSDFNPNSGSDQRVVNGGPPRMSPKAQRHPRNHRVSAGRGSISSGLEFVSHNPPSEAATPPVARTSPSGGTWSSVVSGVPRLSPKTHRPRSPRQNSIGNTPSGPVLASPQAGIIPTEAVAMPIPAASPTPASPASNRAVTPSSEAKDSRLQDQRQNSPAGNKENIKPNETSPSFSKAENKGISPVVSEHRKQIDDLKKFKNDFRLQPSSTSESMDQLLNKNREGEKSRDLIKDKIEPSAKDSFIENSSSNCTSGSSKPNSPSISPSILSNTEHKRGPEVTSQGVQTSSPACKQEKDDKEEKKDAAEQVRKSTLNPNAKEFNPRSFSQPKPSTTPTSPRPQAQPSPSMVGHQQPTPVYTQPVCFAPNMMYPVPVSPGVQPLYPIPMTPMPVNQAKTYRAVPNMPQQRQDQHHQSAMMHPASAAGPPIAATPPAYSTQYVAYSPQQFPNQPLVQHVPHYQSQHPHVYSPVIQGNARMMAPPTHAQPGLVSSSATQYGAHEQTHAMYVSTGSLAQQYAHPNATLHPHTPHPQPSATPTGQQQSQHGGSHPAPSPVQHHQHQAAQALHLASPQQQSAIYHAGLAPTPPSMTPASNTQSPQNSFPAAQQTVFTIHPSHVQPAYTNPPHMAHVPQAHVQSGMVPSHPTAHAPMMLMTTQPPGGPQAALAQSALQPIPVSTTAHFPYMTHPSVQAHHQQQL

SEQ ID NO: 4148 - protein, 1353 aa, Homo sapiens
MEELSADEIRRRRLARLAGGQTSQPTTPLTSPQRENPPGPPIAASAPGPSQSLGLNVHNMTPATSPIGASGVAHRSQSSEGVSSLSSSPSNSLETQSQSLSRSQSMDIDGVSCEKSMSQVDVDSGIENMEVDENDRREKRSLSDKEPSSGPEVSEEQALQLVCKIFRVSWKDRDRDVIFLSSLSAQFKQNPKEVFSDFKDLIGQILMEVLMMSTQTRDENPFASLTATSQPIAAAARSPDRNLLLNTGSNPGTSPMFCSVASFGASSLSSLYESSPAPTPSFWSSVPVMGPSLASPSRAASQLAVPSTPLSPHSAASGTAAGSQPSSPRYRPYTVTHPWASSGVSILSSSPSPPALASSPQAVPASSSRQRPSSTGPPLPPASPSATSRRPSSLRISPSMYDNPFSFLFLALSGDSSDEEDEEEDDDDGDGDDEGGGGGDDFSCVQFGSSLGASGGASNWDSYSDHFTIETCKETDMLNYLIECFDRVGIEEKKAPKMCSQPAVSQLLSNIRSQCISHTALVLQGSLTQPRSLQQPSFLVPYMLCRNLPYGFIQELVRTTHQDEEVFKQIFIPILQGLALAAKECSLDSDYFKYPLMALGELCETKFGKTHPVCNLVASLRLWLPKSLSPGCGRELQRLSYLGAFFSFSVFAEDDVKVVEKYFSGPAITLENTRVVSQSLQHYLELGRQELFKILHSILLNGETREAALSYMAAVVNANMKKAQMQTDDRLVSTDGFMLNFLWVLQQLSTKIKLETVDPTYIFHPRCRITLPNDETRVNATMEDVNDWLTELYGDQPPFSEPKFPTECFFLTLHAHHLSILPSCRRYIRRLRAIRELNRTVEDLKNNESQWKDSPLATRHREMLKRCKTQLKKLVRCKACADAGLLDESFLRRCLNFYGLLIQLLLRILDPAYPDITLPLNSDVPKVFAALPEFYVEDVAEFLFFIVQYSPQALYEPCTQDIVMFLVVMLCNQNYIRNPYLVAKLVEVMFMTNPAVQPRTQKFFEMIENHPLSTKLLVPSLMKFYTDVEHTGATSEFYDKFTIRYHISTIFKSLWQNIAHHGTFMEEFNSGKQFVRYINMLINDTTFLLDESLESLKRIHEVQEEMKNKEQWDQLPRDQQQARQSQLAQDERVSRSYLALATETVDMFHILTKQVQKPFLRPELGPRLAAMLNFNLQQLCGPKCRDLKVENPEKYGFEPKKLLDQLTDIYLQLDCARFAKAIADDQRSYSKELFEEVISKMRKAGIKSTIAIEKFKLLAEKVEEIVAKNARAEIDYSDAPDEFRDPLMDTLMTDPVRLPSGTIMDRSIILRHLLNSPTDPFNRQTLTESMLEPVPELKEQIQAWMREKQNSDH

SEQ ID NO: 4149 - protein, 386 aa, Homo sapiens
MESPISTSFYTDTKGRKPFLLAAERGHVEMIEKLTFLNLHTSEKDKIQWSTLWTAALTKMKTSRNSIAALTIEGACSPGTGVSTSSVSLLQGGNTALHLAAKHGHSPAVQVLLAQWQDINEMNELNISSLQIATRNGHASLVNFLLSENVDLHQKVEPKESPLHLVVINNHITVVNSLLSAQHDIDILNQKQQTPLHVAADRGNVELVETLLKAGCDLKAVDKQGKTALAVASRSNHSLVVGMLIKAERYYAWREEHHESIRDPSTGFTLTFKQDHSLETRHIRTLLWDLAYHQLKANEWQRLARSWNFTDDQIRAIEEQWSGNESFREHGHRALLIWLHGTLMTQGDPAKQLYEELVHAGFPKLAEKTRHFKSKTDSNSKKCVVS

SEQ ID NO: 4150 - protein, 440 aa, Homo sapiens
RIPKREGLGEEDTAVAGHELLLPNERSFQNAAKSNNLDLMEKLFEKKVNINVVNNMNRTALHFAVGRNHLSAVDFLLKHKARVDVADKHGLTVIHLAAWSGSLEVMLMLVKAGADQRAKNQDGMSALHFATQSNHVRIVEYLIQDLHLKDLNQPDEKGRKPFLLAAERGHVEMIEKLTFLNLHTSEKDKGGNTALHLAAKHGHSPAVQVLLAQWQDINEMNELNISSLQIATRNGHASLVNFLLSENVDLHQKVEPKESPLHLVVINNHITVVNSLLSAQHDIDILNQKQQTPLHVAADRGNVELVETLLKAGCDLKAVDKQGKTALAVASRSNHSLVVGMLIKAERYYAWREEHHESIRDPSTGFTLTFKQDHSLETRHIRTLLWDLAYHQLKANEWQRLARSWNFTDDQIRAIEEQWSEKTRHFKSKTDSNSKKCVVS

SEQ ID NO: 4151 - protein, 275 aa, Homo sapiens
MESPISTSFYTDTLNISSLQIATRNGHASLVNFLLSENVDLHQKVEPKESPLHLVVINNHITVVNSLLSAQHDIDILNQKQQTPLHVAADRGNVELVETLLKAGCDLKAVDKQGKTALAVASRSNHSLVVGMLIKAERYYAWREEHHESIRDPSTGFTLTFKQDHSLETRHIRTLLWDLAYHQLKANEWQRLARSWNFTDDQIRAIEEQWSGNESFREHGHRALLIWLHGTLMTQGDPAKQLYEELVHAGFPKLAEKTRHFKSKTDSNSKKCVVS

SEQ ID NO: 4152 - protein, 1061 aa, Homo sapiens
MPHLPLASFRPPFWGLRHSRGLPRFHSVSTQSEPHGSPISRRNREAKQKRLREKQATLEAEIAGESKSPAESIKAWRPKELVLYEIPTKPGEKKDVSGPLPPAYSPRYVEAAWYPWWVREGFFKPEYQARLPQATGETFSMCIPPPNVTGSLHIGHALTVAIQDALVRWHRMRGDQVLWVPGSDHAGIATQAVVEKQLWKERGVRRHELSREAFLREVWQWKEAKGGEICEQLRALGASLDWDRECFTMDVGSSVAVTEAFVRLYKAGLLYRNHQLVNWSCALRSAISDIEVENRPLPGHTQLRLPGCPTPVSFGLLFSVAFPVDGEPDAEVVVGTTRPETLPGDVAVAVHPDDSRYTHLHGRQLRHPLMGQPLPLITDYAVQPHVGTVKVTPAHSPADAEMGARHGLSPLNVIAEDGTMTSLCGDWLQGLHRFVAREKIMSVLSEWGLFRGLQNHPMVLPICSRSGDVIEYLLKNQWFVRCQEMGARAAKAVESGALELSPSFHQKNWQHWFSHIGDWCVSRQLWWGHQIPAYLVVEDHAQGEEDCWVVGRSEAEAREVAAELTGRPGAELTLERDPDVLDTWFSSALFPFSALGWPQETPDLARFYPLSLLETGSDLLLFWVGRMVMLGTQLTGQLPFSKVLLHPMVRDRQGRKMSKSLGNVLDPRDIISGVEMQVLQEKLRSGNLDPAELAIVAAAQKKDFPHGIPECGTDALRFTLCSHGVQAGDLHLSVSEVQSCRHFCNKIWNALRFILNALGEKFVPQPAEELSPSSPMDAWILSRLALAAQECERGFLTRELSLVTHALHHFWLHNLCDVYLEAVKPVLWHSPRPLGPPQVLFSCADLGLRLLAPLMPFLAEELWQRLPPRPGCPPAPSISVAPYPSACSLEHWRQPELERRFSRVQEVVQVLRALRATYQLTKARPRVLLQSSEPGDQGLFEAFLEPLGTLGYCGAVGLLPPGAAAPSGWAQAPLSDTAQVYMELQGLVDPQIQLPLLAARRYKLQKQLDSLTARTPSEGEAGTQRQQKLSSLQLELSKLDKAASHLRQLMDEPPAPGSPEL

SEQ ID NO: 4153 - protein, 1178 aa, Homo sapiens
MSLKPQQQQQQQQQQQQQQQQQQQQQQQPPPAAANVRKPGGSGLLASPAAAPSPSSSSVSSSSATAPSSVVAATSGGGRPGLGRGRNSNKGLPQSTISFDGIYANMRMVHILTSVVGSKCEVQVKNGGIYEGVFKTYSPKCDLVLDAAHEKSTESSSGPKREEIMESILFKCSDFVVVQFKDMDSSYAKRDAFTDSAISAKVNGEHKEKDLEPWDAGELTANEELEALENDVSNGWDPNDMFRYNEENYGVVSTYDSSLSSYTVPLERDNSEEFLKREARANQLAEEIESSAQYKARVALENDDRSEEEKYTAVQRNSSEREGHSINTRENKYIPPGQRNREVISWGSGRQNSPRMGQPGSGSMPSRSTSHTSDFNPNSGSDQRVVNGGVPWPSPCPSPSSRPPSRYQSGPNSLPPRAATPTRPPSRPPSRPSRPPSHPSAHGSPAPVSTMPKRMSSEGPPRMSPKAQRHPRNHRVSAGRGSISSGLEFVSHNPPSEAATPPVARTSPSGGTWSSVVSGVPRLSPKTHRPRSPRQNSIGNTPSGPVLASPQAGIIPTEAVAMPIPAASPTPASPASNRAVTPSSEAKDSRLQDQRQNSPAGNKENIKPNETSPSFSKAENKGISPVVSEHRKQIDDLKKFKNDFRLQPSSTSESMDQLLNKNREGEKSRDLIKDKIEPSAKDSFIENSSSNCTSGSSKPNSPSISPSILSNTEHKRGPEVTSQGVQTSSPACKQEKDDKEEKKDAAEQVRKSTLNPNAKEFNPRSFSQPKPSTTPTSPRPQAQPSPSMVGHQQPTPVYTQPVCFAPNMMYPVPVSPGVQPLYPIPMTPMPVNQAKTYRAVPNMPQQRQDQHHQSAMMHPASAAGPPIAATPPAYSTQYVAYSPQQFPNQPLVQHVPHYQSQHPHVYSPVIQGNARMMAPPTHAQPGLVSSSATQYGAHEQTHAMYACPKLPYNKETSPSFYFAISTGSLAQQYAHPNATLHPHTPHPQPSATPTGQQQSQHGGSHPAPSPVQHHQHQAAQALHLASPQQQSAIYHAGLAPTPPSMTPASNTQSPQNSFPAAQQTVFTIHPSHVQPAYTNPPHMAHVPQCASEALARCGLEMRLSWIYLSEGYLAHVQSGMVPSHPTAHAPMMLMTTQPPGGPQAALAQSALQPIPVSTTAHFPYMTHPSVQAHHQQQL

SEQ ID NO: 4154 - protein, 841 aa, Homo sapiens
MFTTGSPPFGTMGACYHCSPRYGQSISVPRIWKCRHRRSVTPEEGISSEGFPWDGFNEQTPKDLPNRDGGAWVLGYRAGPACPFLLHEEREKSNRSELYLDLHPDHSLTEQDDRTPGRLQAVWPPPKTKDTEEKVGLKYTEAEYQAAILHLKREHKEEIENLQAQFELRAFHIRGEHAMITARLEETIENLKHELEHRWRGGCEERKDVCISTDDDCPPKTFRNVCVQTDRETFLKPCESESKTTRSNQLVPKKLNISSLSQLSPPNDHKDIHAALQPMEGMASNQQKALPPPPASIPPPPPLPSGLGSLSPAPPMPPVSAGPPLPPPPPPPPPLPPPSSAGPPPPPPPPPLPNSPAPPNPGGPPPAPPPPGLAPPPPPGLFFGLGSSSSQCPRKPAIEPSCPMKPLYWTRIQISDRSQNATPTLWDSLEEPDIRDPSEFEYLFSKDTTQQKKKPLSETYEKKNKVKKIIKLLDGKRSQTVGILISSLHLEMKDIQQAIFNVDDSVVDLETLAALYENRAQEDELVKIRKYYETSKEEELKLLDKPEQFLHELAQIPNFAERAQCIIFRSVFSEGITSLHRKVEIITRASKDLLHVKSVKDILALILAFGNYMNGGNRTRGQADGYSLEILPKLKDVKSRDNGINLVDYVVKYYLRYYDQEAGTEKSVFPLPEPQDFFLASQVKFEDLIKDLRKLKRQLEASEKQMVVVCKESPKEYLQPFKDKLEEFFQKAKKEHKMEESHLENAQKSFETTVRYFGMKPKSGEKEITPSYVFMVWYEFCSDFKTIWKRESKNISKERLKMAQESVSKLTSEKKVETKKINPTASLKERLRQKEASVTTN

SEQ ID NO: 4155 - protein, 588 aa, Homo sapiens
MLHLHHSCLCFRSWLPAMLAVLLSLAPSASSDISASRPNILLLMADDLGIGDIGCYGNNTMRTPNIDRLAEDGVKLTQHISAASLCTPSRAAFLTGRYPVRSGMVSSIGYRVLQWTGASGGLPTNETTFAKILKEKGYATGLIGKWHLGLNCESASDHCHHPLHHGFDHFYGMPFSLMGDCARWELSEKRVNLEQKLNFLFQVLALVALTLVAGKLTHLIPVSWMPVIWSALSAVLLLASSYFVGALIVHADCFLMRNHTITEQPMCFQRTTPLILQEVASFLKRNKHGPFLLFVSFLHVHIPLITMENFLGKSLHGLYGDNVEEMDWMVGRILDTLDVEGLSNSTLIYFTSDHGGSLENQLGNTQYGGWNGIYKGGKGMGGWEGGIRVPGIFRWPGVLPAGRVIGEPTSLMDVFPTVVRLAGGEVPQDRVIDGQDLLPLLLGTAQHSDHEFLMHYCERFLHAARWHQRDRTMWKVHFVTPVFQPEGAGACYGRKVCPCFGEKVVHHDPPLLFDLSRDPSETHILTPASEPVFYQVMERVQQAVWEHQRTLSPVPLQLDRLGNIWRPWLQPCCGPFPLCWCLREDDPQ

SEQ ID NO: 4156 - protein, 302 aa, Homo sapiens
MLSFYYYREEGNSLPVVAEHSLVLMQRGLFSDGDTSKKKKNVTMRSIKTTRDRVPTYQYNMNFEKLGKCIIINNKNFDKVTGMGVRNGTDKDAEALFKCFRSLGFDVIVYNDCSCAKMQDLLKKASEEDHTNAACFACILLSHGEENVIYGKDGVTPIKDLTAHFRGDRCKTLLEKPKLFFIQACRGTELDDGIQADSGPINDTDANPRYKIPVEADFLFAYSTVPGYYSWRSPGRGSWFVQALCSILEEHGKDLEIMQILTRVNDRVARHFESQSDDPHFHEKKQIPCVVSMLTKELYFSQ

SEQ ID NO: 4157 - protein, 1167 aa, Homo sapiens
MSLKPQQQQQQQQQQQQQQQQQQQQQQQPPPAAANVRKPGGSGLLASPAAAPSPSSSSVSSSSATAPSSVVAATSGGGRPGLGRGRNSNKGLPQSTISFDGIYANMRMVHILTSVVGSKCEVQVKNGGIYEGVFKTYSPKCDLVLDAAHEKSTESSSGPKREEIMESILFKCSDFVVVQFKDMDSSYAKRDAFTDSAISAKVNGEHKEKDLEPWDAGELTANEELEALENDVSNGWDPNDMFRYNEENYGVVSTYDSSLSSYTVPLERDNSEEFLKREARANQLAEEIESSAQYKARVALENDDRSEEEKYTAVQRNSSEREGHSINTRENKYIPPGQRNREVISWGSGRQNSPRMGQPGSGSMPSRSTSHTSDFNPNSGSDQRVVNGVFILSFISFVLSGVPWPSPCPSPSSRPPSRYQSGPNSLPPRAATPTRPPSRPPSRPSRPPSHPSAHGSPAPVSTMPKRMSSEGPPRMSPKAQRHPRNHRVSAGRGSISSGLEFVSHNPPSEAATPPVARTSPSGGTWSSVVSGVPRLSPKTHRPRSPRQNSIGNTPSGPVLASPQAGIIPTEAVAMPIPAASPTPASPASNRAVTPSSEAKDSRLQDQRQNSPAGNKENIKPNETSPSFSKAENKGISPVVSEHRKQIDDLKKFKNDFRLQPSSTSESMDQLLNKNREGEKSRDLIKDKIEPSAKDSFIENSSSNCTSGSSKPNSPSISPSILSNTEHKRGPEVTSQGVQTSSPACKQEKDDKEEKKDAAEQVRKSTLNPNAKEFNPRSFSQPKPSTTPTSPRPQAQPSPSMVGHQQPTPVYTQPVCFAPNMMYPVPVSPGVQPLYPIPMTPMPVNQAKTYRAGKVPNMPQQRQDQHHQSAMMHPASAAGPPIAATPPAYSTQYVAYSPQQFPNQPLVQHVPHYQSQHPHVYSPVIQGNARMMAPPTHAQPGLVSSSATQYGAHEQTHAMYACPKLPYNKETSPSFYFAISTGSLAQQYAHPNATLHPHTPHPQPSATPTGQQQSQHGGSHPAPSPVQHHQHQAAQALHLASPQQQSAIYHAGLAPTPPSMTPASNTQSPQNSFPAAQQTVFTIHPSHVQPAYTNPPHMAHVPQAHVQSGMVPSHPTAHAPMMLMTTQPPGGPQAALAQSALQPIPVSTTAHFPYMTHPSVQAHHQQQL

SEQ ID NO: 4158 - protein, 705 aa, Homo sapiens
MSKLGISFSEDQQKEKDQLGKAPKKEEAAALRKDISGSDKRSLEKNQINFWRNQMTKRWEPSLNWKTTVNYKGKGSAKEIQEDKHTGKLEKPRPSVSHGRAQLLRKSAEKIEETVSDSSSESEEDEEPPDHRQEASADLPSEYWQIQKLVKYLKGGNQTATVIALCSMRDFSLAQETCQLAIRDVGGLEVLINLLETDEVKCKIGSLKILKEISHNPQIRQNIVDLGGLPIMVNILDSPHKSLKCLAAETIANVAKFKRARRVVRQHGGITKLVALLDCAHDSTKPAQSSLYEARDVEVARCGALALWSCSKSHTNKEAIRKAGGIPLLARLLKTSHENMLIPVVGTLQECASEENYRAAIKAERIIENLVKNLNSENEQLQEHCAMAIYQCAEDKETRDLVRLHGGLKPLASLLNNTDNKERLAAVTGAIWKCSISKENVTKFREYKAIETLVGLLTDQPEEVLVNVVGALGECCQERENRVIVRKCGGIQPLVNLLVGINQALLVNVTKAVGACAVEPESMMIIDRLDGVRLLWSLLKNPHPDVKASAAWALCPCIKNAKDAGEMVRSFVGGLELIVNLLKSDNKEVLASVCAAITNIAKDQENLAVITDHGVVPLLSKLANTNNNKLRHHLAEAISRCCMWGRNRVAFGEHKAVAPLVRYLKSNDTNVHRATAQALYQLSEDADNCITMHENGAVKKNIFIS

SEQ ID NO: 4159 - protein, 1155 aa, Homo sapiens
MSLKPQQQQQQQQQQQQQQQQQQQQQQQPPPAAANVRKPGGSGLLASPAAAPSPSSSSVSSSSATAPSSVVAATSGGGRPGLGRGRNSNKGLPQSTISFDGIYANMRMVHILTSVVGSKCEVQVKNGGIYEGVFKTYSPKCDLVLDAAHEKSTESSSGPKREEIMESILFKCSDFVVVQFKDMDSSYAKRDAFTDSAISAKVNGEHKEKDLEPWDAGELTANEELEALENDVSNGWDPNDMFRYNEENYGVVSTYDSSLSSYTVPLERDNSEEFLKREARANQLAEEIESSAQYKARVALENDDRSEEEKYTAVQRNSSEREGHSINTRENKYIPPGQRNREVISWGSGRQNSPRMGQPGSGSMPSRSTSHTSDFNPNSGSDQRVVNGGVPWPSPCPSPSSRPPSRYQSGPNSLPPRAATPTRPPSRPPSRPSRPPSHPSAHGSPAPVSTMPKRMSSEGPPRMSPKAQRHPRNHRVSAGRGSISSGLEFVSHNPPSEAATPPVARTSPSGGTWSSVVSGVPRLSPKTHRPRSPRQNSIGNTPSGPVLASPQAGIIPTEAVAMPIPAASPTPASPASNRAVTPSSEAKDSRLQDQRQNSPAGNKENIKPNETSPSFSKAENKGISPVVSEHRKQIDDLKKFKNDFRLQPSSTSESMDQLLNKNREGEKSRDLIKDKIEPSAKDSFIENSSSNCTSGSSKPNSPSISPSILSNTEHKRGPEVTSQGVQTSSPACKQEKDDKEEKKDAAEQVRKSTLNPNAKEFNPRSFSQPKPSTTPTSPRPQAQPSPSMVGHQQPTPVYTQPVCFAPNMMYPVPVSPGVQPLYPIPMTPMPVNQAKTYRAGKVPNMPQQRQDQHHQSAMMHPASAAGPPIAATPPAYSTQYVAYSPQQFPNQPLVQHVPHYQSQHPHVYSPVIQGNARMMAPPTHAQPGLVSSSATQYGAHEQTHAMYACPKLPYNKETSPSFYFAISTGSLAQQYAHPNATLHPHTPHPQPSATPTGQQQSQHGGSHPAPSPVQHHQHQAAQALHLASPQQQSAIYHAGLAPTPPSMTPASNTQSPQNSFPAAQQTVFTIHPSHVQPAYTNPPHMAHVPQAHVQSGMVPSHPTAHAPMMLMTTQPPGGPQAALAQSALQPIPVSTTAHFPYMTHPSVQAHHQQQL

SEQ ID NO: 4160 - protein, 204 aa, Homo sapiens
MGTVSSRRSWWPLPLLLLLLLLLGPAGARAQEDEDGDYEELVLALRSEEDGLAEAPEHGTTATFHRCAKDPWRLPGTYVVVLKEETHLSQSERTARRLQAQAARRGYLTKILHVFHGLLPGFLVKMSGDLLELALKLPHVDYIEEDSSVFAQSIPWNLERITPPRYRADEYQPPGVPGPGHFRWRRTLLAATCLKSSFGLAESF

SEQ ID NO: 4161 - protein, 902 aa, Homo sapiens
MDSNTAPLGPSCPQPPPAPQPQARSRLNATASLEQERSERPRAPGPQAGPGPGVRDAAAPAEPQAQHTRSRERADGTGPTKGDMEIPFEEVLERAKAGDPKAQTEVGKHYLQLAGDTDEELNSCTAVDWLVLAAKQGRREAVKLLRRCLADRRGITSENEREVRQLSSETDLERAVRKAALVMYWKLNPKKKKQVAVAELLENVGQVNEHDGGAQPGPVPKSLQKQRRMLERLVSSELWGAHAVFSHASAKNYIALDDFVEITKKYAKGVIPSSLFLQDDEDDDELAGKSPEDLPLRLKVVKYPLHAIMEIKEYLIDMASRAGMHWLSTIIPTHHINALIFFFIVSNLTIDFFAFFIPLVIFYLSFISMVICTLKVFQDSKAWENFRTLTDLLLRFEPNLDVEQAEVNFGWNHLEPYAHFLLSVFFVIFSFPIASKDCIPCSELAVITGFFTVTSYLSLSTHAEPYTRRALATEVTAGLLSLLPSMPLNWPYLKVLGQTFITVPVGHLVVLNVSVPCLLYVYLLYLFFRMAQLRNFKGTYCYLVPYLVCFMWCELSVVILLESTGLGLLRASIGYFLFLFALPILVAGLALVGVLQFARWFTSLELTKIAVTVAVCSVPLLLRWWTKASFSVVGMVKSLTRSSMVKLILVWLTAIVLFCWFYVYRSEGMKVYNSTLTWQQYGALCGPRAWKETNMARTQILCSHLEGHRVTWTGRFKYVRVTDIDNSAESAINMLPFFIGDWMRCLYGEAYPACSPGNTSTAEEELCRLKLLAKHPCHIKKFDRYKFEITVGMPFSSGADGSRSREEDDVTKDIVLRASSEFKSVLLSLRQGSLIEFSTILEGRLGSKWPVFELKAISCLNCMAQLSPTRRHVKIEHDWRSTVHGAVKFAFDFFFFPFLSAA

SEQ ID NO: 4162 - protein, 4589 aa, Homo sapiens
MDDLRVLWMRDRVYAAFGITDPQLFEDLLNRDDGQGEDLILHFLNQASEEEGPSALFIYRTMVPEEVEVEIDEIPVLSEEGEEEEETYSQKVESVDKVRAKRVSLRTESLGQPLNREDEEMDKEISEKLPSKRTAKHIMEKMHLHMLCTPLPEEFLDQNVVFFLRNTKEAISEATDMKEAMEIMPETLEYGIINANVLHFLKNIICQVFLPALSFNQHRTSTTVGVTSGEVSNSSEHESDLPPMPGEAVEYHSIQLIRDEFLMNVQKFASNIQRTMQQLEGEIKLEMPIISVEGEVSDLAADPETVDILEQCVINWLNQISTAVEAQLKKTPQGKGPLAEIEFWRERNATLSALHEQTKLPIVRKVLDVIKESDSMLVANLQPVFTELFKFHTEASDNVRFLSTVERYFKNITHGSGFHVVLDTIPAMMSALRMVWIISRHYNKDERMIPLMERIAWEIAERVCRVVNLRTLFKENRASAQSKTLEARNTLRLWKKAYFDTRAKIEASGREDRWEFDRKRLFERTDYMATICQDLSDVLQILEEFYNIFGPELKAVTGDPKRIDDVLCRVDGLVTPMENLTFDPFSIKSSQFWKYVMDEFKIEVLVIEKEAKHFIDESFKTLRSAEAAFDMLLKFKHIRSREAVNRQMMMKFNDILAQYCKEIDIINKIFVQNLENPPLYKNHPPVAGAIYWERSLFFRIKHTILRFQEVQEILDSDRGQEVKQKYLEVGRTMKEYEDRKYEQWMEVTEQVLPALMKKSLLTKSSIATEEPSTLERGAVFAINFSPALREIINETKYLEQLGFTVPELARNVALQEDKFLRYTAGIQRMLDHYHMLIGTLNDAESVLLKDHSQELLRVFRSGYKRLNWNSLGIGDYITGCKQAIGKFESLVHQIHKNADDISSRLTLIEAINLFKYPAAKSEEELPGVKEFFEHIERERASDVDHMVRWYLAIGPLLTKVEGLVVHTNTGKAPKLASYYKYWEKKIYEVLTKLILKNLQSFNSLILGNVPLFHTETILTAPEIILHPNTNEIDKMCFHCVRNCVEITKHFVRWMNGSCIECPPQKGEEEEVVIINFYNDISLNPQIIEQAVMIPQNVHRILINLMKYLQKWKRYRPLWKLDKAIVMEKFAAKKPPCVAYDEKLQFYSKIAYEVMRHPLIKDEHCIRLQLRHLANTVQENAKSWVISLGKLLNESAKEELYNLHEEMEHLAKNLRKIPNTLEDLKFVLATIAEIRSKSLVMELRYRDVQERYRTMAMYNLFPPDAEKELVDKIESIWSNLFNDSVNVEHALGDIKRTFTELTRGEIMNYRVQIEEFAKRFYSEGPGSVGDDLDKGVELLGVYERELARHEKSRQELANAEKLFDLPITMYPELLKVQKEMSGLRMIYELYEGLKVAKEEWSQTLWINLNVQILQEGIEGFLRALRKLPRPVRGLSVTYYLEAKMKAFKDSIPLLLDLKNEALRDRHWKELMEKTSVFFEMTETFTLENMFAMELHKHTDVLNEIVTAAIKEVAIEKAVKEILDTWENMKFTVVKYCKGTQERGYILGSVDEIIQSLDDNTFNLQSISGSRFVGPFLQTVHKWEKTLSLIGEVIEIWMLVQRKWMYLESIFIGGDIRSQLPEEAKKFDNIDKVFKRIMGETLKDPVIKRCCEAPNRLSDLQNVSEGLEKCQKSLNDYLDSKRNAFPRFFFISDDELLSILGSSDPLCVQEHMIKMYDNIASLRFNDGDSGEKLVSAMISAEGEVMEFRKILRAEGRVEDWMTAVLNEMRRTNRLITKEAIFRYCEDRSRVDWMLLYQGMVVLAASQVWWTWEVEDVFHKAQKGEKQAMKNYGRKMHRQIDELVTRITMPLSKNDRKKYNTVLIIDVHARDIVDSFIRGSILEAREFDWESQLRFYWDREPDELNIRQCTGTFGYGYEYMGLNGRLVITPLTDRIYLTLTQALSMYLGGAPAGPAGTGKTETTKDLAKALGLLCVVTNCGEGMDYRAVGKIFSGLAQCGAWGCFDEFNRIDASVLSVISSQIQTIRNALIHQLTTFQFEGQEISLDSRMGIFITMNPGYAGRTELPESVKALFRPVVVIVPDLQQICEIMLFSEGFLEAKTLAKKMTVLYKLAREQLSKQYHYDFGLRALKSVLVMAGELKRGSSDLREDVVLMRALRDMNLPKFVFEDVPLFLGLISDLFPGLDCPRVRYPDFNDAVEQVLEENGYAVLPIQVDKVVQMFETMLTRHTTMVVGPTRGGKSVVINTLCQAQTKLGLTTKLYILNPKAVSVIELYGILDPTTRDWTDGVLSNIFREINKPTDKKERKYILFDGDVDALWVENMNSVMDDNRLLTLANGERIRLQAHCALLFEVGDLQYASPATVSRCGMVYVDPKNLKYRPYWKKWVNQIPNKVEQYNLNSLFEKYVPYLMDVIVEGIVDGRQAEKLKTIVPQTDLNMVTQLAKMLDALLEGEIEDLDLLECYFLEALYCSLGASLLEDGRMKFDEYIKRLASLSTVDTEGVWANPGELPGQLPTLYDFHFDNKRNQWVPWSKLVPEYIHAPERKFINILVHTVDTTRTTWILEQMVKIKQPVIFVGESGTSKTATTQNFLKNLSEETNIVLMVNFSSRTTSMDIQRNLEANVEKRTKDTYGPPMGKRLLVFMDDMNMPRVDEYGTQQPIALLKLLLEKGYLYDRGKELNCKSIRDLGFIAAMGKAGGGRNEVDPRFISLFSVFNVPFPSEESLHLIYSSILKGHTSTFHESIVAVSGKLTFCTLALYKNIVQDLPPTPSKFHYIFNLRDLSRVFNGLVLTNPERFQTVAQMVRVWRNECLRVFHDRLISETDKQLVQQHIGSLVVEHFKDDVEVVMRDPILFGDFQMALHEGEPRIYEDIQDYEAAKALFQEILEEYNESNTKMNLVLFDDALEHLTRVHRIIRMDRGHALLVGVGGSGKQSLSRLAAFTASCEVFEILLSRGYSENSFREDLKSLYLKLGIENKAMIFLFTDAHVAEEGFLELINNMLTSGIVPALFSEEEKESILSQIGQEALKQGMGPAKESVWQYFVNKSANNLHIVLGMSPVGDTLRTWCRNFPGMVNNTGIDWFMPWPPQALHAVAKSFLGYNPMIPAENIENVVKHVVLVHQSVDHYSQQFLQKLRRSNYVTPKNYLDFINTYSKLLDEKTQCNIAQCKRLDGGLDKLKEATIQLDELNQKLAEQKIVLAEKSAACEALLEEIAVNTAVAEEKKKLAEEKAMEIEEQNKVIAMEKAEAETTLAEVMPILEAAKLELQKLDKSDVTEIRSFAKPPKQVQTVCECILIMKGYKELNWKTAKGVMSDPNFLRSLMEIDFDSITQSQVKNIKGLLKTLNTTTEEMEAVSKAGLGMLKFVEAVMGYCDVFREIKPKREKVARLERNFYLTKRELERIQNELAAIQKELETLGAKYEAAILEKQKLQEEAEIMERRLIAADKLISGLGSENIRWLNDLDELMHRRVKLLGDCLLCAAFLSYEGAFTWEFRDEMVNRIWQNDILEREIPLSQPFRLESLLTDDVEISRWGSQGLPPDELSVQNGILTTRASRFPLCIDPQQQALNWIKRKEEKNNLRVASFNDPDFLKQLEMSIKYGTPFLFRDVDEYIDPVIDNVLEKNIKVSQGRQFIILGDKEVDYDSNFRLYLNTKLANPRYSPSVFGKAMVINYTVTLKGLEDQLLSVLVAYERRELEEQREHLIQETSENKNLLKDLEDSLLRELATSTGNMLDNVDLVHTLEETKSKATEVSEKLKLAEKTALDIDRLRDGYRPAARRGAILFFVLSEMALVNSMYQYSLIAFLEVFRLSLKKSLPDSILMKRLRNIMDTLTFSIYNHGCTGLFERHKLLFSFNMTIKIEQAEGRVPQEELDFFLKGNISLEKSKRKKPCAWLSDQGWEDIILLSEMFSDNFGQLPDDVENNQTVWQEWYDLDSLEQFPVPLGYDNNITPFQKLLILRCFRVDRVYRAVTDYVTVTMGEKYVQPPMISFEAIFEQSTPHSPIVFILSPGSDPATDLMKLAERSGFGGNRLKFLAMGQGQEKVALQLLETAVARGQWLMLQNCHLLVKWLKDLEKSLERITKPHPDFRLWLTTDPTKGFPIGILQKSLKVVTEPPNGLKLNMRATYFKISHEMLDQCPHPAFKPLVYVLAFFHAVVQERRKFGKIGWNVYYDFNESDFQVCMEILNTYLTKAFQQRDPRIPWGSLKYLIGEVMYGGRAIDSFDRRILTIYMDEYLGDFIFDTFQPFHFFRNKEVDYKIPVGDEKEKFVEAIEALPLANTPEVFGLHPNAEIGYYTQAARDMWAHLLELQPQTGESSSGISRDDYIGQVAKEIENKMPKVFDLDQVRKRLGTGLSPTSVVLLQELERFNKLVVRMTKSLAELQRALAGEVGMSNELDDVARSLFIGHIPNIWRRLAPDTLKSLGNWMVYFLRRFSQYMLWVTESEPSVMWLSGLHIPESYLTALVQATCRKNGWPLDRSTLFTQVTKFQDADEVNERAGQGCFVSGLYLEGADWDIEKGCLIKSKPKVLVVDLPILKIIPIEAHRLKLQNTFRTPVYTTSMRRNAMGVGLVFEADLFTTRHISHWVLQGVCLTLNSD

SEQ ID NO: 4163 - protein, 135 aa, Homo sapiens
RFKHLRKYTYNYEAESSSGVPGTADSRSATRINCKVELEVPQLCSFILKTSQCTLKEVYGFNPEGKALLKKTKNSEEFAAAMSRIPCMETAPLTLPSRRGRAMWQQKYPLKETWGSVIASSPSAQASAHLLSSKA

SEQ ID NO: 4164 - protein, 394 aa, Homo sapiens
MASMAAVLTWALALLSAFSATQARKGFWDYFSQTSGDKGRVEQIHQQKMAREPAGSVRDDLGTKEMMEASSLTAWISVPFSRTLKDSLEQDLNNMNKFLEKLRPLSGSEAPRLPQDPVGMRRQLQEELEEVKARLQPYMAEAHELVGWNLEGLRQQLKPYTMDLMEQVALRVQELQEQLRVVGEDTKAQLLGGVDEAWALLQGLQSRVVHHTGRFKELFHPYAESLVSGIGRHVQELHRSVAPHAPASPARLSRCVQVLSRKLTLKAKALHARIQQNLDQLREELSRAFAGTGTEEGAGPDPQMLSEEVRQRLQAFRQDTYLQIAAFTRAIDQETEEVQQQLAPPPPGHSAFAPEFQQTDSGKVLSKLQARLDDLWEDITHSLHDQGHSHLGDP

SEQ ID NO: 4165 - protein, 169 aa, Homo sapiens
KDVINEAWFPEDQRVLTPNLVAALPPSTHGAGWQLFCRTVWSAHSGPTRMATAVARCAPDEELLSCSSFSRSGKRRGERMEAQGGKLVCRAHNAFGGEGVYAIARCCLLPQANCSVHTAPPAEASMGTRVHCHQQGHVLTGFLALASDLKERGSDGDGHWRRSIPAFHI

SEQ ID NO: 4166 - protein, 427 aa, Homo sapiens
TRSRERADGTGPTKGDMEIPFEEVLERAKAGDPKAQTEVGKHYLQLAGDTDEELNSCTAVDWLVLAAKQGRREAVKLLRRCLADRRGITSENEREVRQLSSETDLERAVRKAALVMYWKLNPKKKKQVAVAELLENVGQVNEHDGGAQPGPVPKSLQKQRRMLERLVSSESKNYIALDDFVEITKKYAKGVIPSSLFLQDDEDDDELAGKSPEDLPLRLKQPHHRLLRLLHPAGHLLPVLHLHGDLHPQGVPGQQGLGELPHPHRPAAALRAQPGCGAGRGQLRLEPPGALCPFPALCLLRHLLLPHRQQGLHPLLGAGCHHRLLYRDQLPEPEHPCRALHAQGPGHRGHRRPAIAAALHALELALPEGPWPDLHHRACRPPGRPQRQRPVPALCLPALSLLPHGTAEEFQGHLLLPCALPGVLHVV

SEQ ID NO: 4167 - protein, 1281 aa, Homo sapiens
MSSSRAQQMHAFSWIRNTLEEHPETSLPKQEVYDEYKSYCDNLGYHPLSAADFGKIMKNVFPNMKARRLGTRGKSKYCYSGLRKKAFVHMPTLPNLDFHKTGDGLEGAEPSGQLQNIDEEVISSACRLVCEWAQKVLSQPFDTVLELARFLVKSHYIGTKSMAALTVMAAAPAGMKGITQPSAFIPTAESNSFQPQVKTLPSPIDAKQQLQRKIQKKQQEQKLQSPLPGESAAKKSESATSNGVTNLPNGNPSILSPQPIGIVVAAVPSPIPVQRTRQLVTSPSPMSSSDGKVLPLNVQVVTQHMQSVKQAPKTPQNVPASPGGDRSARHRYPQILPKPANTSALTIRSPTTVLFTSSPIKTAVVPASHMSSLNVVKMTTISLTPSNSNTPLKHSASVSSATGTTEESRSVPQIKNGSVVSLQSPGSRSSSAGGTSAVEVKVEPETSSDEHPVQCQENSDEAKAPQTPSALLGQKSNTDGALQKPSNEGVIEIKATKVCDQRTKCKSRCNEMLPGTSTGNNQSTITLSVASQNLTFTSSSSPPNGDSINKDPKLCTKSPRKRLSSTLQETQVPPVKKPIVEQLSAATIEGQKQGSVKKDQKVPHSGKTEGSTAGAQIPSKVSVNVSSHIGANQPLNSSALVISDSALEQQTTPSSSPDIKVKLEGSVFLLDSDSKSVGSFNPNGWQQITKDSEFISASCEQQQDISVMTIPEHSDINDLEKSVWELEGMPQDTYSQQLHSQIQESSLNQIQAHSSDQLPLQSELKEFEPSVSQTNESYFPFDDELTQDSIVEELVLMEQQMSMNNSHSYGNCLGMTLQSQSVTPGAPMSSHTSSTHFYHPIHSNGTPIHTPTPTPTPTPTPTPTPTPTSEMIAGSQSLSRESPCSRLAQTTPVDSALGSSRHTPIGTPHSNCSSSVPPSPVECRNPFAFTPISSSMAYHDASIVSSSPVKPMQRPMATHPDKTKLEWMNNGYSGVGNSSVSGHGILPSYQELVEDRFRKPHAFAVPGQSYQSQSRHHDTHFGRLTPVSPVQHQGATVNNTNKQEGFAVPAPLDNKGTNSSASSNFRCRSVSPAVHRQRNLSGSTLYPVSNIPRSNVTPFGSPVTPEVHVFTNVHTDACANNIAQRSQSVPLTVMMQTAFPNALQKQANSKKITNVLLSKLDSDNDDAVRGLGMNNLPSNYTARMNLTQILEPSTVFPSANPQNMIDSSTSVYEFQTPSYLTKSNSTGQINFSPGDNQAQSEIGEQQLDFNSTVKDLLSGDSLQTNQQLCSCPSSLLAGMQM

SEQ ID NO: 4168 - protein, 567 aa, Homo sapiens
MSGDLLELALKLPHVDYIEEDSSVFAQSIPWNLERITPPRYRADEYQPPDGGSLVEVYLLDTSIQSDHREIEGRVMVTDFENVPEEDGTRFHRQASKCDSHGTHLAGVVSGRDAGVAKGASMRSLRVLNCQGKGTVSGTLIGLEFIRKSQLVQPVGPLVVLLPLAGGYSRVLNAACQRLARAGVVLVTAAGNFRDDACLYSPASAPEVITVGATNAQDQPVTLGTLGTNFGRCVDLFAPGEDIIGASSDCSTCFVSQSGTSQAAAHVAGIAAMMLSAEPELTLAELRQRLIHFSAKDVINEAWFPEDQRVLTPNLVAALPPSTHGAGWQLFCRTVWSAHSGPTRMATAVARCAPDEELLSCSSFSRSGKRRGERMEAQGGKLVCRAHNAFGGEGVYAIARCCLLPQANCSVHTAPPAEASMGTRVHCHQQGHVLTGCSSHWEVEDLGTHKPPVLRPRGQPNQCVGHREASIHASCCHAPGLECKVKEHGIPAPQEQVTVACEEGWTLTGCSALPGTSHVLGAYAVDNTCVVRSRDVSTTGSTSEGAVTAVAICCRSRHLAQASQELQ

SEQ ID NO: 4169 - protein, 392 aa, Homo sapiens
MTPQPAGPPDGGWGWVVAAAAFAINGLSYGLLRSLGLAFPDLAEHFDRSAQDTAWISALALAVQQAASPVGSALSTRWGARPVVMVGGVLASLGFVFSAFASDLLHLYLGLGLLAGFGWALVFAPALGTLSRYFSRRRVLAVGLALTGNGASSLLLAPALQLLLDTFGWRGALLLLGAITLHLTPCGALLLPLVLPGDPPAPPRSPLAALGLSLFTRRAFSIFALGTALVGGGYFVPYVHLAPHALDRGLGGYGAALVVAVAAMGDAGARLVCGWLADQGWVPLPRLLAVFGALTGLGLWVVGLVPVVGGEESWGGPLLAAAVAYGLSAGSYAPLVFGVLPGLVGVGGVVQATGLVMMLMSLGGLLGPPLSGKDLSSQICLQLSSAPGVRGF

SEQ ID NO: 4170 - protein, 1460 aa, Homo sapiens
MAEEQQQPPPQQPDAHQQLPPSAPNSGVALPALVPGLPGTEASALQHKIKNSICKTVQSKVDCILQEVEKFTDLEKLYLYLQLPSGLSNGEKSDQNAMSSSRAQQMHAFSWIRNTLEEHPETSLPKQEVYDEYKSYCDNLGYHPLSAADFGKIMKNVFPNMKARRLGTRGKSKYCYSGLRKKAFVHMPTLPNLDFHKTGDGLEGAEPSGQLQNIDEEVISSACRLVCEWAQKVLSQPFDTVLELARFLVKSHYIGTKSMAALTVMAAAPAGMKGITQPSAFIPTAESNSFQPQVKTLPSPIDAKQQLQRKIQKKQQEQKLQSPLPGESAAKKSESATSNGVTNLPNGNPSILSPQPIGIVVAAVPSPIPVQRTRQLVTSPSPMSSSDGKVLPLNVQVVTQHMQSVKQAPKTPQNVPASPGGDRSARHRYPQILPKPANTSALTIRSPTTVLFTSSPIKTAVVPASHMSSLNVVKMTTISLTPSNSNTPLKHSASVSSATGTTEESRSVPQIKNGSVVSLQSPGSRSSSAGGTSAVEVKVEPETSSDEHPVQCQENSDEAKAPQTPSALLGQKSNTDGALQKPSNEGVIEIKATKVCDQRTKCKSRCNEMLPGTSTGNNQSTITLSVASQNLTFTSSSSPPNGDSINKDPKLCTKSPRKRLSSTLQETQVPPVKKPIVEQLSAATIEGQKQGSVKKDQKVPHSGKTEGSTAGAQIPSKVSVNVSSHIGANQPLNSSALVISDSALEQQTTPSSSPDIKVKLEGSVFLLDSDSKSVGSFNPNGWQQITKDSEFISASCEQQQDISVMTIPEHSDINDLEKSVWELEGMPQDTYSQQLHSQIQESSLNQIQAHSSDQLPLQSELKEFEPSVSQTNESYFPFDDELTQDSIVEELVLMEQQMSMNNSHSYGNCLGMTLQSQSVTPGAPMSSHTSSTHFYHPIHSNGTPIHTPTPTPTPTPTPTPTPTPTSEMIAGSQSLSRESPCSRLAQTTPVDSALGSSRHTPIGTPHSNCSSSVPPSPVECRNPFAFTPISSSMAYHDASIVSSSPVKPMQRPMATHPDKTKLEWMNNGYSGVGNSSVSGHGILPSYQELVEDRFRKPHAFAVPGQSYQSQSRHHDTHFGRLTPVSPVQHQGATVNNTNKQEGFAVPAPLDNKGTNSSASSNFRCRSVSPAVHRQRNLSGSTLYPVSNIPRSNVTPFGSPVTPEVHVFTNVHTDACANNIAQRSQSVPLTVMMQTAFPNALQKQANSKKITNVLLSKLDSDNDDAVRGLGMNNLPSNYTARMNLTQILEPSTVFPSANPQNMIDSSTSVYEFQTPSYLTKSNSTGQINFSPGDNQAQSEIGEQQLDFNSTVKDLLSGDSLQTNQQLVGQGASDLTNTASDFSSDIRLSSELSGSINDLNTLDPNLLFDPGRQQGQDDEATLEELKNDPLFQQICSESMNSMTSSGFEWIESKDHPTVEMLG

SEQ ID NO: 4171 - protein, 879 aa, Homo sapiens
MLRRRAQEEDSTVLIDVSPPEAEKRGSYGSTAHASEPGGQQAAACRAGSPAKPRIADFVLVWEEDLKLDRQQDSAARDRTDMHRTWRETFLDNLRAAGLCVDQQDVQDGNTTVHYALLSASWAVLCYYAEDLRLKLPLQELPNQASNWSAGLLAWLGIPNVLLEVVPDVPPEYYSCRFRVNKLPRFLGSDNQDTFFTSTKRHQILFEILAKTPYGHEKKNLLGIHQLLAEGVLSAAFPLHDGPFKTPPEGPQAPRLNQRQVLFQHWARWGKWNKYQPLDHVRRYFGEKVALYFAWLGFYTGWLLPAAVVGTLVFLVGCFLVFSDIPTQELCGSKDSFEMCPLCLDCPFWLLSSACALAQAGRLFDHGGTVFFSLFMALWAVLLLEYWKRKSATLAYRWDCSDYEDTEERPRPQFAASAPMTAPNPITGEDEPYFPERSRARRMLAGSVVIVVMVAVVVMCLVSIILYRAIMAIVVSRSGNTLLAAWASRIASLTGSVVNLVFILILSKIYVSLAHVLTRWEMHRTQTKFEDAFTLKVFIFQFVNFYSSPVYIAFFKGRFVGYPGNYHTLFGVRNEECAAGGCLIELAQELLVIMVGKQVINNMQEVLIPKLKGWWQKFRLRSKKRKAGASAGASQGPWEDDYELVPCEGLFDEYLEMVLQFGFVTIFVAACPLAPLFALLNNWVEIRLDARKFVCEYRRPVAERAQDIGIWFHILAGLTHLAVISNAFLLAFSSDFLPRAYYRWTRAHDLRGFLNFTLARAPSSFAAAHNRTCRYRAFRDDDGHYSQTYWNLLAIRLAFVIVFEHVVFSVGRLLDLLVPDIPESVEIKVKREYYLAKQALAENEVLFGTNGTKDEQPEGSELSSHWTPFTVPKASQLQQ

SEQ ID NO: 4172 - protein, 764 aa, Homo sapiens
MADLDSPPKLSGVQQPSEGVGGGRCSEISAELIRSLTELQELEAVYERLCGEEKVVERELDALLEQQNTIESKMVTLHRMGPNLQLIEGDAKQLAGMITFTCNLAENVSSKVRQLDLAKNRLYQAIQRADDILDLKFCMDGVQTALRSEDYEQAAAHTHRYLCLDKSVIELSRQGKEGSMIDANLKLLQEAEQRLKAIVAEKFAIATKEGDLPQVERFFKIFPLLGLHEEGLRKFSEYLCKQVASKAEENLLMVLGTDMSDRRAAVIFADTLTLLFEGIARIVETHQPIVETYYGPGRLYTLIKYLQVECDRQVEKVVDKFIKQRDYHQQFRHVQNNLMRNSTTEKIEPRELDPILTEVTLMNARSELYLRFLKKRISSDFEVGDSMASEEVKQEHQKCLDKLLNNCLLSCTMQELIGLYVTMEEYFMRETVNKAVALDTYEKGQLTSSMVDDVFYIVKKCIGRALSSSSIDCLCAMINLATTELESDFRDVLCNKLRMGFPATTFQDIQRGVTSAVNIMHSSLQQGKFDTKGIESTDEAKMSFLSDCTKLFSQGIGGEQAQAKFDSCLSDLAAVSNKFRDLLQEGLTELNSTAIKPQVQPWINSFFSVSHNIEEEEFNDYEANDPWVQQFILNLEQQMAEFKASLSPVIYDSLTGLMTSLVAVELEKVVLKSTFNRLGGLQFDKELRSLIAYLTTVTTWTIRDKFARLSQMATILNLERVTEILDYWGPNSGPLTWRLTPAEVRQVLALRIDFRSEDIKRLRL

SEQ ID NO: 4173 - protein, 1870 aa, Homo sapiens
ENSILKDEKKTLEDMLKIHTPVSQEERLIFLDSIKSKSKDSVWEKEIEILIEENEDLKQQCIQLNEEIEKQRNTFSFAEKNFEVNYQELQEEYACLLKVKDDLEDSKNKQELEYKSKLKALNEELHLQRINPTTVKMKSSVFDEDKTFVAETLEMGEVVEKDTTELMEKLEVTKREKLELSQRLSDLSEQLKQKHGEISFLNEEVKSLKQEKEQVSLRCRELEIIINHNRAENVQSCDTQVSSLLDGVVTMTSRGAEGSVSKVNKSFGEESKIMVEDKVSFENMTVGEESKQEQLILDHLPSVTKESSLRATQPSENDKLQKELNVLKSEQNDLRLQMEAQRICLSLVYSTHVDQVREYMENEKDKALCSLKEELIFAQEEKIKELQKIHQLELQTMKTQETGDEGKPLHLLIGKLQKAVSEECSYFLQTLCSVLGEYYTPALKCEVNAEDKENSGDYISENEDPELQDYRYEVQDFQENMHTLLNKVTEEYNKLLVLQTRLSKIWGQQTDGMKLEFGEENLPKEETEFLSIHSQMTNLEDIDVNHKSKLSSLQDLEKTKLEEQVQELESLISSLQQQLKETEQNYEAEIHCLQKRLQAVSESTVPPSLPVDSVVITESDAQRTMYPGSCVKKNIDGTIEFSGEFGVKEETNIVKLLEKQYQEQLEEEVAKVIVSMSIAFAQQTELSRISGGKENTASSKQAHAVCQQEQHYFNEMKLSQDQIGFQTFETVDVKFKEEFKPLSKELGEHGKEILLSNSDPHDIPESKDCVLTISEEMFSKDKTFIVRQSIHDEISVSSMDASRQLMLNEEQLEDMRQELVRQYQEHQQATELLRQAHMRQMERQREDQEQLQEEIKRLNRQLAQRSSIDNENLVSERERVLLEELEALKQLSLAGREKLCCELRNSSTQTQNGNENQGEVEEQTFKEKELDRKPEDVPPEILSNESLHGGIWPLRFWLPHWIISMERSQYGTQTRKTVYALQKANNRLLKILLEVVKTTAAVEETIGRHVLGILDRSSKSQSSASLIWRSEAEASVKSCVHEEHTRVTDESIPSYSGSDMPRNDINMWSKVTEEGTELSQRLVRSGFAGTEIDPENEELMLNISSRLQAAVEKLLEAISETSSQLEHAKVTQTELMRESFRQKQEATESLKCQEELRERLHEESRAREQLAVELSKAEGVIDGYADEKTLFERQIQEKTDIIDRLEQELLCASNRLQELEAEQQQIQEERELLSRQKEAMKAEAGPVEQQLLQETEKLMKEKLEVQCQAEKVRDDLQKQVKALEIDVEEQVSRFIELEQEKNTELMDLRQQNQALEKQLEKMRKFLDEQAIDREHERDVFQQEIQKLEQQLKVVPRFQPISEHQTREVEQLANHLKEKTDKCSELLLSKEQLQRDIQERNEEIEKLEFRVRELEQALLVEDRKHFGAVEAKPELSLEVQLQAERDAIDRKEKEITNLEEQLEQFREELENKNEEVQQLHMQLEIQKKESTTRLQELEQENKLFKDDMEKLGLAIKESDAMSTQDQHVLFGKFAQIIQEKEVEIDQLNEQVTKLQQQLKITTDNKVIEEKNELIRDLETQIECLMSDQECVKRNREEEIEQLNEVIEKLQQELANIGQKTSMNAHSLSEEADSLKHQLDVVIAEKLALEQQVETANEEMTFMKNVLKETNFKMNQLTQELFSLKRERESVEKIQSIPENSVNVAIDHLSKDKPELEVVLTEDALKSLENQTYFKSFEENGKGSIINLETRLLQLESTVSAKDLELTQCYKQIKDMQEQGQFETEMLQKKIVNLQKIVEEKVAAALVSQIQLEAVQEYAKFCQDNQTISSEPERTNIQNLNQLREDELGSDISALTLRISELESQVVEMHTS

SEQ ID NO: 4174 - protein, 300 aa, Homo sapiens
LHLAPSREAATAGPGGGTMGASVSRGRAARVPAPEPEPEEALDLSQLPPELLLVVLSHVPPRTLLGRCRQVCRGWRALVDGQALWLLILARDHGATGRALLHLARSCQSPARNARPCPLGRFCARRPIGRNLIRNPCGQGLRKWMVQHGGDGWVVEENRTTVPGAPSQTCFVTSFSWCCKKQVLDLEEEGLWPELLDSGRIEICVSDWWGARHDSGCMYRLLVQLLDANQTVLDKFSAVPDPIPQWNNNACLHVTHVFSNIKMGVRFVSFEHRGQDTQFWAGHYGARVTNSSVIVRVRLS

SEQ ID NO: 4175 - protein, 75 aa, Homo sapiens
LEEWLLSVSIYSAQPCALGFIWYLCPFLQSPKLKFRGRIAFHRILSDPMGARVCAGRRRQQESHAGGDTATRDLR

SEQ ID NO: 4176 - protein, 133 aa, Homo sapiens
LKEELGGHIGKRTLVAGKWHAQRPEVRVRGDGTLEEQDESQQVRAQWRVGTNWGPDLRVCAPAELMFLETSALTGENVEEAFLKCARTILNKIDSGELDPERMGSGIQYGDASLRQLRQPRSAQAVAPQPCGC

SEQ ID NO: 4177 - protein, 35 aa, Homo sapiens
LANVCPPEPLTIPQELPKPETRVICPQLPIWPCCC

SEQ ID NO: 4178 - protein, 67 aa, Homo sapiens
LVSVSLAISLSLKISAPVSMSLSLCAPRIFRAPTPVPRGPRLGAGPPTSAETQSVERSPPSPHPQPL

SEQ ID NO: 4179 - protein, 142 aa, Homo sapiens
LQPQTQPRAIPKPIPKPNSTPSPSLITSPAPSSASSPTPCLSPIPTLPPISPQLQSITPFKPSSTKLLSSPGHIPILPQPPAPTPIIPLSSPLTPIYPPSLSLTIQPSPSHFPTLVLHRPEANFTHVPIPNLVPIPDSKSNP

SEQ ID NO: 4180 - protein, 62 aa, Homo sapiens
MPTLRVPVLSVWLLRWWRVLGAGRVLPDSLSLSPPPPTGCQTKPERGWGSQPPSVLCPQAPV

SEQ ID NO: 4181 - protein, 105 aa, Homo sapiens [sequence omitted]

SEQ ID NO: 4182 - protein, 43 aa, Homo sapiens
MPVARSWVCHKTYVTPRRPFEKSRLDQELKLIGEYGFRNKREV

SEQ ID NO: 4183 - protein, 32 aa, Homo sapiens
LSCSTGIQELGTGKGSKLVVWEDGNQLLHSSE

SEQ ID NO: 4184 - protein, 58 aa, Homo sapiens [sequence omitted]

SEQ ID NO: 4185 - protein, 53 aa, Homo sapiens
LLGVPHSPLSLLCSAFHHPVFLRLLVSVCPSPLLCVSHLCLLLSLFPALSLCL

SEQ ID NO: 4186 - protein, 88 aa, Homo sapiens
LYGAVGVPKPRPFPLPSPKMARAWLLQPPGLGKERERGRRAGMRKGSQEGGRKGEYGGGRELRRKSRGPPGGSDAAPAAQNVGAQREV

SEQ ID NO: 4187 - protein, 67 aa, Homo sapiens
VMRRHSRRYLKTGKNAATNRRRKRQKCVFHLEHPEGAQPYQHLDFDPVTLILDLWPPELLENKFALF

SEQ ID NO: 4188 - protein, 80 aa, Homo sapiens
LLFVSEIDILPPEVASSQSVMKTDSQAEMDSSLWTLPFPSRSMSYITKEIALHWFMFAVTVVHCIDVHTNLNVMSLYISV

SEQ ID NO: 4189 - protein, 402 aa, Homo sapiens
VPGAESGTMKRQNVRTLALIVCTFTYLLVGAAVFDALESEPELIERQRLELRQQELRARYNLSQGGYEELERVVLRLKPHKAGVQWRFAGSFYFAITVITTIGYGHAAPSTDGGKVFCMFYALLGIPLTLVMFQSLGERINTLVRYLLHRAKKGLGMRRADVSMANMVLIGFFSCISTLCIGAAAFSHYEHWTFFQAYYYCFITLTTIGFGDYVALQKDQALQTQPQYVAFSFVYILTGLTVIGAFLNLVVLRFMTMNAEDEKRDAEHRALLTRNGQAGGGGGGGSAHTTDTASSTAAAGGGGFRNVYAEVLHFQSMCSCLWYKSREKLQYSIPMIIPRDLSTSDTCVEQSHSSPGGGGRYSDTPSRRCLCSGAPRSAISSVSTGLHSLSTFRGLMKRRSSV

SEQ ID NO: 4190 - protein, 116 aa, Homo sapiens
LGPKIKSQEKIMERKIHWNSWRASLSLESLFCYSLLLLLPFPTPSQAREICVKFTRGVDFNWQAQALLALQEAAEAFLVHLFEDAYLLTLHAGRVTLFPKDVQLARRIRGLEEGLG

SEQ ID NO: 4191 - protein, 32 aa, Homo sapiens
LPKELPLKANYRLLLPCTKLRNLFGCPFLPGV

SEQ ID NO: 4192 - protein, 59 aa, Homo sapiens
LCKGKGRNVLYLRHCTYPGRLEIQKQHGIASPLKTMRGFRMSPIGVADQMDISLKNQYI

SEQ ID NO: 4193 - protein, 42 aa, Homo sapiens
LLSTLPSCTDQCFRQNHIHGTLLQLTTQSLETTKKEVYIVRR

SEQ ID NO: 4194 - protein, 623 aa, Homo sapiens
VGASPRLKRIQDITCQRVLSGVGSPRVWETRSWQGRASGGGKEGPWSRGRGPRCAARSTAGLATLGSALAPPSALSSAPLRPPPFPPFLLLLLPPRPLPDFARSDPRGCPPLRTPLAARARSAARPHRFTMLKALFLTMLTLALVKSQDTEETITYTQCTDGYEWDPVRQQCKDIDECDIVPDACKGGMKCVNHYGGYLCLPKTAQIIVNNEQPQQETQPAEGTSGATTGVVAASSMATSGVLPGGGFVASAAAVAGPEMQTGRNNFVIRRNPADPQRIPSNPSHRIQCAAGYEQSEHNVCQDIDECTAGTHNCRADQVCINLRGSFACQCPPGYQKRGEQCVDIDECTIPPYCHQRCVNTPGSFYCQCSPGFQLAANNYTCVDINECDASNQCAQQCYNILGSFICQCNQGYELSSDRLNCEDIDECRTSSYLCQYQCVNEPGKFSCMCPQGYQVVRSRTCQDINECETTNECREDEMCWNYHGGFRCYPRNPCQDPYILTPENRCVCPVSNAMCRELPQSIVYKYMSIRSDRSVPSDIFQIQATTIYANTINTFRIKSGNENGEFYLRQTSPVSAMLVLVKSLSGPREHIVDLEMLTVSSIGTFRTSSVLRLTIIVGPFSF

SEQ ID NO: 4195 - protein, 65 aa, Homo sapiens
LRTPLAARARSAARPHRFTMLKALFLTMLTLALVKSQDTEETITYTQCTDGYEWDPVRQQCKEDS

SEQ ID NO: 4196 - protein, 52 aa, Homo sapiens
LRTPLAARARSAARPHRFTMLKALFLTMLTLALVKSQDTEETITYTVRGDGI

SEQ ID NO: 4197 - protein, 240 aa, Homo sapiens [sequence omitted]

SEQ ID NO: 4198 - protein, 63 aa, Homo sapiens
VLAPVGLRVEAGGVWVPSSSDRWMDLSSKRKEETRWQISLKPKIACEAIIRRNKNRHKNRGKE

SEQ ID NO: 4199 - protein, 30 aa, Homo sapiens
LLSPSTLSPLVPLCPMHSHLSQPPVLPVWC

SEQ ID NO: 4200 - protein, 43 aa, Homo sapiens
MAFTLTSPWAYDVTRSHHAQRPGPSRQNRGLSVEPLARPHDGG

SEQ ID NO: 4201 - protein, 33 aa, Homo sapiens
MLRNKTFNKISEDSSKSAIVSLSFLNVNIILTC

SEQ ID NO: 4202 - protein, 182 aa, Homo sapiens
LPTLSPSLAAQATGPSSQCPLGPGSLGPKHHQKGVSRERSNITPSPTPGTCPRAATYGSLLPQPASPHCDPPPWAPVPGSQHHGQALPWTEKEFFSCSACTWPEEGVEAGLAGAVLLGKMAPHLEGGGLLQGVQGQRRKGPGDWASMWRMGPACSKPRPAPSLCSNGQSCSRLCSTICFKLK

SEQ ID NO: 4203 - protein, 87 aa, Homo sapiens
LSYEALPMALETICRPSGRKSSKMQAFRIWDVNQKTFYLRNNQLVAGYLQGPNVNLEGEWLPGKPMYVGITSLCPSVCSSMACLHKP

SEQ ID NO: 4204 - protein, 105 aa, Homo sapiens
LPCCSHRMEICRGLRSHLITLLLFLFHSETICRPSGRKSSKMQAFRIWDVNQKTFYLRNNQLVAGYLQGPNVNLEGEWLPGKPMYVGITSLCPSVCSSMACLHKP

SEQ ID NO: 4205 - protein, 103 aa, Homo sapiens
LDKTTNKCKGYGFVDFDSPAAAQKAVSALKASGVQAQMAKQQEQDPTNLYISNLPLSMDEQELENMLKPFGQVISTRILRDSSGTSRGVGFARFFFFFVRNKT

SEQ ID NO: 4206 - protein, 629 aa, Homo sapiens
LGARRAQRPPPPPFPASAGAASSLRPARPPLLPPLLAGFGGDGGGGGGRGGRAPAERCRRRGKGSFKWKVVRRPARPPALLRSIMAEPSGSPVHVQLPQQAAPVTAAAAAAPAAATAAPAPAAPAAPAPAPAPAAQAVGWPICRDAYELQEVIGSGATAVVQAALCKPRQERVAIKRINLEKCQTSMDELLKEIQAMSQCSHPNVVTYYTSFVVKDELWLVMKLLSGGSMLDIIKYIVNRGEHKNGVLEEAIIATILKEVLEGLDYLHRNGQIHRDLKAGNILLGEDGSVQIADFGVSAFLATGGDVTRNKVRKTFVGTPCWMAPEVMEQVRGYDFKADMWSFGITAIELATGAAPYHKYPPMKVLMLTLQNDPPTLETGVEDKEMMKKYGKSFRKLLSLCLQKDPSKRPTAAELLKCKFFQKAKNREYLIEKLLTRTPDIAQRAKKVRRVPGSSGHLHKTEDGDWEWSDDEMDEKSEEGKAAFSQEKSRRVKEENPEIAVSASTIPEQIQSLSVHDSQGPPNANEDYREASSCAVNLVLRLRNSRKELNDIRFEFTPGRDTADGVSQELFSAGLVDGHDVVIVAANLQKIVDDPKALKTLTFKLASGCDGSEIPDEVKLIGFAQLSVS

SEQ ID NO: 4207 - protein, 46 aa, Homo sapiens
LGKGEEVGLEQASKVRKLYWDSSRKWGGKGAREGVWRDEICVRTCV

SEQ ID NO: 4208 - protein, 156 aa, Homo sapiens
LPQLRGPRAGRAHWSSRERGLSRGRGAGGMALVPYEETTEFGLQKFHKPLATFSFANHTIQIRQDWRHLGVAAVVWDAAIVLSTYLEMGAVELRGRSAVELGAGTGLVGIVAALLENTGQMQTEGYSKRKQITTLQKLQGHQRQGNKLSQTEGDYN

SEQ ID NO: 4209 - protein, 119 aa, Homo sapiens
LPQLRGPRAGRAHWSSRERGLSRGRGAGGMALVPYEETTEFGLQKFHKPLATFSFANHTIQIRQDWRHLGVAAVVWDAAIVLSTYLEMGAVELRGRSAVELGAGTGLVGIVAALLGGGI

SEQ ID NO: 4210 - protein, 243 aa, Homo sapiens
LSHCYHYRSSRWRRGGLSRGRGAGGMALVPYEETTEFGLQKFHKPLATFSFANHTIQIRQDWRHLGVAAVVWDAAIVLSTYLEMGAVELRGRSAVELGAGTGLVGIVAALLGAHVTITDRKVALEFLKSNVQANLPPHIQTKTVVKELTWGQNLGSFSPGEFDLILGADIIYLEETFTDLLQTLEHLCSNHSVILLACRIRYERDNNFLAMLERQFTVRKVHYDPEKDVHIYEAQKRNQKEDL

SEQ ID NO: 4211 - protein, 247 aa, Homo sapiens
LPQLRGPRAGRAHWSSRERGLSRGRGAGGMALVPYEETTEFGLQKFHKPLATFSFANHTIQIRQDWRHLGVAAVVWDAAIVLSTYLEMGAVELRGRSAVELGAGTGLVGIVAALLGAHVTITDRKVALEFLKSNVQANLPPHIQTKTVVKELTWGQNLGSFSPGEFDLILGADIIYLEETFTDLLQTLEHLCSNHSVILLACRIRYERDNNFLAMLERQFTVRKVHYDPEKDVHIYEAQKRNQKEDL

SEQ ID NO: 4212 - protein, 269 aa, Homo sapiens
LSPSSANAPPLKNRHNAQATKSEAESGGAHDRKGREAHSAPGLSRGRGAGGMALVPYEETTEFGLQKFHKPLATFSFANHTIQIRQDWRHLGVAAVVWDAAIVLSTYLEMGAVELRGRSAVELGAGTGLVGIVAALLGAHVTITDRKVALEFLKSNVQANLPPHIQTKTVVKELTWGQNLGSFSPGEFDLILGADIIYLEETFTDLLQTLEHLCSNHSVILLACRIRYERDNNFLAMLERQFTVRKVHYDPEKDVHIYEAQKRNQKEDL

SEQ ID NO: 4213 - protein, 131 aa, Homo sapiens
LPQLRGPRAGRAHWSSRERGLSRGRGAGGMALVPYEETTEFGLQKFHKPLATFSFANHTIQIRQDWRHLGVAAVVWDAAIVLSTYLEMGAVELRGRSAVELGAGTGLVGIVAALLAAAFQNSTGSMGRGGG

SEQ ID NO: 4214 - protein, 170 aa, Homo sapiens
LPSLHLCLSSGKRAVVGYEDGTIRIWDLKQGSPIHVLKGIRGGGSVSLGLCREGLRTWGRTQRGGRTKPELPPCSMLGTEGHQGPLTCVAANQDGSLILTGSVDCQAKLVSATTGKVSGPGARLGPPLSRLLSFLPGSSLSPLPTVFLSIKHPDSVSSSDPLWLSGGGCF

SEQ ID NO: 4215 - protein, 185 aa, Homo sapiens
VGWGDGPPCCPFLPVQWMEWHPRAPVLLAGTADGNTWMWKVPNGDCKTFQGPNCPATCGRVLPDGKRAVVGYEDGTIRIWDLKQGSPIHVLKGTEGHQGPLTCVAANQDGSLILTGSVDCQAKLVSATTGKVSGPGARLGPPLSRLLSFLPGSSLSPLPTVFLSIKHPDSVSSSDPLWLSGGGCF

SEQ ID NO: 4216 - protein, 350 aa, Homo sapiens
LRRMESESESGAAADTPPLETLSFHGDEEIIEVVELDPGPPDPDDLAQEMEDVDFEEEEEEEGNEEGWVLEPQEGVVGSMEGPDDSEVTFALHSASVFCVSLDPKTNTLAVTGGEDDKAFVWRLSDGELLFECAGHKDSVTCAGFSHDSTLVATGDMSGLLKVWQVDTKEEVWSFEAGDLEWMEWHPRAPVLLAGTADGNTWMWKVPNGDCKTFQGPNCPATCGRVLPDGKRAVVGYEDGTIRIWDLKQGSPIHVLKGTEGHQGPLTCVAANQDGSLILTGSVDCQAKLVSATTGKVSGPGARLGPPLSRLLSFLPGSSLSPLPTVFLSIKHPDSVSSSDPLWLSGGGCF

SEQ ID NO: 4217 - protein, 250 aa, Homo sapiens [sequence omitted]

SEQ ID NO: 4218 - protein, 276 aa, Homo sapiens
MVLGTREVGDSTPLPSPSLYPFTGNEFVQHNTWQLSRVYPSGLRTDSSNYNPQELWNAGCQMVAMNMQTAGLEMDICDGHFRQNGGCGYVLKPDFLRDIQSSFHPEKPISPFKAQTLLIQVISGQQLPKVDKTKEGSIVDPLVKVQIFGVRLDTARQETNYVENNGFNPYWGQTLCFRVLVPELAMLRFVVMDYDWKSRNDFIGQYTLPWTCMQQGEPAPLAPGQYPSSGCLPNAVLLPLPGYRHIHLLSKDGISLRPASIFVYICIQEGLEGDES

SEQ ID NO: 4219 - protein, 386 aa, Homo sapiens
LGRAVSGPRALGGSAARSVGACSRAVWRQQPTQFINPETPGYVGFANLPNQVHRKSVKKGFEFTLMVVGESGLGKSTLINSLFLTDLYPERVIPGAAEKIERTVQIEASTVEIEERGVKLRLTVVDTPGYGDAINCRDCFKTIISYIDEQFERYLHDESGLNRRHIIDNRVHCCFYFISPFGHGLKPLDVAFMKAIHNKVNIVPVIAKADTLTLKERERLKKRILDEIEEHNIKIYHLPDAESDEDEDFKEQTRLLKASIPFSVVGSNQLIEAKGKKVRGRLYPWGVVEVENPEHNDFLKLRTMLITHMQDLQEVTQDLHYENFRSERLKRGGRKVENEDMNKDQILLEKEAELRRMQEMIARMQAQMQMQMQGGDGDGGALGHHV

SEQ ID NO: 4220 - protein, 83 aa, Homo sapiens
MHLCKFELFSFLQLNWELEDTWLQKKQNQTHHGHHSVPGQWEGSQGQVCQGGPAHPSSVPVNTYQVPWALLGTTWRASQSKPP

SEQ ID NO: 4221 - protein, 588 aa, Homo sapiens
LGGAVNAQARRRPAHSGSAALGLRRALRVGARDVIVGAQPAAPCPSPPGPEYRPPTKEEPEVSVPAAMLPRRPLAWPAWLLRGAPGAAGSWGRPVGPLARRGCCSAPGTPEVPLTRERYPVRRLPFSTVSKQDLAAFERIVPGGVVTDPEALQAPNVDWLRTLRGCSKVLLRPRTSEEVSHILRHCHERNLAVNPQGGNTGMVGGSVPVFDEIILSTARMNRVLSFHSVSGILVCQAGCVLEELSRYVEERDFIMPLDLGAKGSCHIGGNVATNAGGLRFLRYGSLHGTVLGLEVVLADGTVLDCLTSLRKDNTGYDLKQLFIGSEGTLGIITTVSILCPPKPRAVNVAFLGCPGFAEVLQTFSTCKGMLGEILSAFEFMDAVCMQLVGRHLHLASPVQESPFYVLIETSGSNAGHDAEKLGHFLEHALGSGLVTDGTMATDQRKVKMLWALRERITEALSRDGYVYKYDLSLPVERLYDIVTDLRARLGPHAKHVVGYGHLGDGNLHLNVTAEAFSPSLLAALEPHVYEWTAGQQGSVSAEHGVGFRKRDVLGYSKPPGALQLMQQLKALLDPKGILNPYKTLPSQA

SEQ ID NO: 4222 - protein, 290 aa, Homo sapiens
LGLRRALRVGARDVIVGAQPAAPCPSPPGPEYRPPTKEEPEVSVPAAMLPRRPLAWPAWLLRGAPGAAGSWGRPVGPLARRGCCSAPGTPEVPLTRERYPVRRLPFSTVSKQDLAAFERIVPGGVVTDPEALQAPNVDWLRTLRGCSKVLLRPRTSEEVSHILRHCHERNLAVNPQGGNTGMVGGSVPVFDEIILSTARMNRVLSFHSVSGGLRPGGAEPVCGGTGLHHAAGLRSQGQLPHRGKRGNQRWRPAVSSIWLTAWDCPGPGSGAGRRHCPGLPDLPEEGQHGL

SEQ ID NO: 4223 - protein, 367 aa, Homo sapiens
LGLRRALRVGARDVIVGAQPAAPCPSPPGPEYRPPTKEEPEVSVPAAMLPRRPLAWPAWLLRGAPGAAGSWGRPVGPLARRGCCSAPGTPEVPLTRERYPVRRLPFSTVSKQDLAAFERIVPGGVVTDPEALQAPNVDWLRTLRGCSKVLLRPRTSEEVSHILRHCHERNLAVNPQGGNTGMVGGSVPVFDEIILSTARMNRVLSFHSVSGILVCQAGCVLEELSRYVEERDFIMPLDLGAKGSCHIGGNVATNAGGLRFLRYGSLHGTVLGLEVVLADGTVLDCLTSLRKDNTGYDLKQLFIGSEGTLGIITTVSILCPPKPRAVNVAFLDAVGPEGKDHRGAEPGWLRVQVRPLPPCGAALRHRD

SEQ ID NO: 4224 - protein, 440 aa, Homo sapiens
LGLRRALRVGARDVIVGCSKVLLRPRTSEEVSHILRHCHERNLAVNPQGGNTGMVGGSVPVFDEIILSTARMNRVLSFHSVSGILVCQAGCVLEELSRYVEERDFIMPLDLGAKGSCHIGGNVATNAGGLRFLRYGSLHGTVLGLEVVLADGTVLDCLTSLRKDNTGYDLKQLFIGSEGTLGIITTVSILCPPKPRAVNVAFLGCPGFAEVLQTFSTCKGMLGEILSAFEFMDAVCMQLVGRHLHLASPVQESPFYVLIETSGSNAGHDAEKLGHFLEHALGSGLVTDGTMATDQRKVKMLWALRERITEALSRDGYVYKYDLSLPVERLYDIVTDLRARLGPHAKHVVGYGHLGDGNLHLNVTAEAFSPSLLAALEPHVYEWTAGQQGSVSAEHGVGFRKRDVLGYSKPPGALQLMQQLKALLDPKGILNPYKTLPSQA

SEQ ID NO: 4225 - protein, 140 aa, Homo sapiens
LEKEVTVQLTKMPYTFLTNKPTNLHSVIQAQLPVAPREAMRDKSLRATEVDLPEPQFVNEPVSHLINTILGAAPGHRRVTPKPWLTLTAPWVCGRPGALGSVCQCNRLVFFQWGGAGSGWDRAASSQRLWGRLEATAPHP

SEQ ID NO: 4226 - protein, 41 aa, Homo sapiens
VIMLQVLSGPLAKGVVSEGHRYLGICQAGVFSVSAVHSSPL

SEQ ID NO: 4227 - protein, 579 aa, Homo sapiens
LETVHVWIREHFHYGTGYKHTPGRLQESQTEEKAFPSAATAAAAAFESPLLSWFFLPNQRHLRCCRCSLWCHSAAGQRMRLPKLLTFLLWYLAWLDLEFICTVLGAPDLGQRPQGTRPGLAKAEAKERPPLARNVFRPGGHSYGGGATNANARAKGGTGQTGGLTQPKKDEPKKLPPRPGGPEPKPGHPPQTRQATARTVTPKGQLPGGKAPPKAGSVPSSFLLKKAREPGPPREPKEPFRPPPITPHEYMLSLYRTLSDADRKGGNSSVKLEAGLANTITSFIDKGQDDRGPVVRKQRYVFDISALEKDGLLGAELRILRKKPSDTAKPAAPGGGRAAQLKLSSCPSGRQPAALLDVRSVPGLDGSGWEVFDIWKLFRNFKNSAQLCLELEAWERGRAVDLRGLGFDRAARQVHEKALFLVFGRTKKRDLFFNEIKARSGQDDKTVYEYLFSQRRKRRAPLATRQGKRPSKNLKARCSRKALHVNFKDMGWDDWIIAPLEYEAFHCEGLCEFPLRSHLEPTNHAVIQTLMNSMDPESTPPTCCVPTRLSPISILFIDSANNVVYKQYEDMVVESCGCR

SEQ ID NO: 4228 - protein, 24 aa, Homo sapiens
LDRSFFLCCWMRVSEYALDLILER

SEQ ID NO: 4229 - protein, 131 aa, Homo sapiens
LKSPLHLQGARTGRESPGPPHPPHHPPPSACLGQPASWPQDLPGAGSGWTWRRNGKGRSPHSCSSWASGDRNTSQGGQEGLPWDQCKEVLLSLGSLRTRKETLWRLPFDLWTPPVITLDGVCGVQVYFLFK

SEQ ID NO: 4230 - protein, 106 aa, Homo sapiens
VPGLGGKVQGPPTLPTTLRHQPAWASLPPGLRISLGQEVGGLGGGTARAGPHTLAPPGHLGTGTPLRVAKRGFLGTSARKFCCPWEVSEPGRKPCGGCPLTFGRHL

SEQ ID NO: 4231 - protein, 191 aa, Homo sapiens
LHHRIRQAPNPYSSEIKAFDTRLQRGELFSREDLVWYKKVLWEARKFELDRHEVILCTCSCAASASLKILDVRQILVDEAGMATEPETLIPLVQFPQAEKVVLLGDHKQLRPVVKNERLQNLGLDRSLFERYHEDAHMLDTQYRMHEGICAFPSVAFYKSKLKTWQGLRRPPSVLGHAGKESCPLTFGRHL

SEQ ID NO: 4232 - protein, 109 aa, Homo sapiens
MPKIVLNGVTVDFPFQPYKCQQEYMTKVLECLQQKVNGILESPTGTGKTLCLLCTTLAWREHLRDGISARKIAERAQGELFPDRALSSWGNAAAAAGDPIDSWLSAGPS

SEQ ID NO: 4233 - protein, 1400 aa, Homo sapiens
MPKIVLNGVTVDFPFQPYKCQQEYMTKVLECLQQKVNGILESPTGTGKTLCLLCTTLAWREHLRDGISARKIAERAQGELFPDRALSSWGNAAAAAGDPIACYTDIPKIIYASRTHSQLTQVINELRNTSYRPKVCVLGSREQLCIHPEVKKQESNHLQIHLCRKKVASRSCHFYNNVEEKSLEQELASPILDIEDLVKSGSKHRVCPYYLSRNLKQQADIIFMPYNYLLDAKSRRAHNIDLKGTVVIFDEAHNVEKMCEESASFDLTPHDLASGLDVIDQVLEEQTKAAQQGEPHPEFSADSPSPGLNMELEDIAKLKMILLRLEGAIDAVELPGDDSGVTKPGSYIFELFAEAQITFQTKGCILDSLDQIIQHLAGRAGVFTNTAGLQKLADIIQIVFSVDPSEGSPGSPAGLGALQSYKVHIHPDAGHRRTAQRSDAWSTTAARKRGKVLSYWCFSPGHSMHELVRQGVRSLILTSGTLAPVSSFALEMQIPFPVCLENPHIIDKHQIWVGVVPRGPDGAQLSSAFDRRFSEECLSSLGKALGNIARVVPYGLLIFFPSYPVMEKSLEFWRARDLARKMEALKPLFVEPRSKGSFSETISAYYARVAAPGSTGATFLAVCRGKASEGLDFSDTNGRGVIVTGLPYPPRMDPRVVLKMQFLDEMKGQGGAGGQFLSGQEWYRQQASRAVNQAIGRVIRHRQDYGAVFLCDHRFAFADARAQLPSWVRPHVRVYDNFGHVIRDVAQFFRVAERTMPAPAPRATAPSVRGEDAVSEAKSPGPFFSTRKAKSLDLHVPSLKQRSSGSPAAGDPESSLCVEYEQEPVPARQRPRGLLAALEHSEQRAGSPGEEQAHSCSTLSLLSEKRPAEEPRGGRKKIRLVSHPEEPVAGAQTDRAKLFMVAVKQELSQANFATFTQALQDYKGSDDFAALAACLGPLFAEDPKKHNLLQGFYQFVRPHHKQQFEEVCIQLTGRGCGYRPEHSIPRRQRAQPVLDPTGRTAPDPKLTVSTAAAQQLDPQEHLNQGRPHLSPRPPPTGDPGSQPQWGSGVPRAGKQGQHAVSAYLADARRALGSAGCSQLLAALTAYKQDDDLDKVLAVLAALTTAKPEDFPLLHRFSMFVRPHHKQRFSQTCTDLTGRPYPGMEPPGPQEERLAVPPVLTHRAPQPGPSRSEKTGKTQSKISSFLRQRPAGTVGAGGEDAGPSQSSGPPHGPAASEWGEPHGRDIAGQQATGAPGGPLSAGCVCQGCGAEDVVPFQCPACDFQRCQACWQRHLQASRMCPACHTASRKQSVMQVFWPEPHKDHEGAGGARPVAAVPGVGAACPAAGAGCTRSGRNTHLPLAGRRDRGAAGVRPVPPRHLCAAAVPPRQPHDVWPVSTAPLHAVLELPRALPLLQRPLRGA

SEQ ID NO: 4234 - protein, 173 aa, Homo sapiens
LGTEMQYCKEEGPPASTNTIFSCMKGTVVVKFVRHSKHAEWRGSELSYLNLLRSKAAITWDPVALPLQRPQEDRMERDWSPNQGALRSNQRVGRGQSWGGLSGGLWDNLWPYGFGLEIRRAYHFRCNHFWTCFCRQSLMLKTQRMGNSRGLSFKIDFCDPLIVRYCKVTLRVS

SEQ ID NO: 4235 - protein, 64 aa, Homo sapiens
LRGGHRKTFCAKCRLAVSGMGLRWRVRRGRQTSCTSIVPICGIQRRKAHGFPTRGGVLGFPIGL

SEQ ID NO: 4236 - protein, 108 aa, Homo sapiens
LLALSMRRRRPGCPASRHGSVHHRPPRCLCPSLPFKGKRYLFIFLPWTLEISGENSALATKCSGSRMLPSFLPFHMEFIQSTKASHGTDIRGARSPGSGKHKPVLRGP

SEQ ID NO: 4237 - protein, 47 aa, Homo sapiens
MEKFPENTCLGGETRERDWVTACSVITPCSVRELYAVEPQGLVRPRP

SEQ ID NO: 4238 - protein, 266 aa, Homo sapiens
LSPSGRGAGAEPGPATASPAAGQRPPSPGPMPAELRQEQSPGSQASLATMPEAPDVLEETVTVEEDPGTPTSHVSIVTSEDGTTRRTETKVTKTVKTVTTRTVRQVPVGPDGLPLLDGGPPLGPFADGALDRHFLLRGGGPVATLSRAYLSSGGGFPEGPEPRDSPSYGSLSRGLGMRPPRAGPLGPGPGDGCFTLPGHREAFPVGPEPGPPGGRSLPERFQAEPYGLEDDTRSLAADDEGGPELEPDYGTATRRRPECGRGLHTR

SEQ ID NO: 4239 - protein, 85 aa, Homo sapiens
LVSLGKAQIQKGWAPESCTSSLRYPCAENSVHGGERGQAGVAERQWHSHHHSSDLLPPGIPQTSPPAGSLDLQGPGQPPPTWRES

SEQ ID NO: 4240 - protein, 60 aa, Homo sapiens
LACPVEATSSMCRPWMRSCSSSSPCSSCTATTSPSCSSPTRPGPGTWLCGRTRAPSWPSC

SEQ ID NO: 4241 - protein, 56 aa, Homo sapiens
MDVQTLCFPHAPQLRTQPCLPGVCSMALQPSSVGHAGGARKRSHRPAMLGRLLGSD

SEQ ID NO: 4242 - protein, 144 aa, Homo sapiens
MEEEEDDDLELFGGYDSFRSYNSSVGSESSSYLEESSEAENEDREAGELPTSPLHLLSPGTPRSLDGSGSEPGKTTDQKSQSPAQGCLVCQNWSLPPLSRDRTAGRWDTNRTRRSGLGLRLGEVPEGSQLQGCSRQLFQARPTL

SEQ ID NO: 4243 - protein, 20 aa, Homo sapiens
LKGFRPGVKPSRPPHCHCPA

SEQ ID NO: 4244 - protein, 444 aa, Homo sapiens
LTEAVRQSVSPASTVSSLSRYTLIATQVPLYDQWEDVMKGMKVEVLNSDAVLPSRVYWIASVIQTAGYRVLLRYEGFENDASHDFWCNLGTVDVHPIGWCAINSKILVPPRTIHAKFTDWKGYLMKRLVGSRTLPVDFHIKMVESMKYPFRQGMRLEVVDKSQVSRTRMAVVDTVIGGRLRLLYEDGDSDDDFWCHMWSPLIHPVGWSRRVGHGIKMSERRSDMAHHPTFRKIYCDAVPYLFKKVRAVYTEGGWFEEGMKLEAIDPLNLGNICVATVCKVLLDGYLMICVDGGPSTDGLDWFCYHASSHAIFPATFCQKNDIELTPPKGYEAQTFNWENYLEKTKSKAAPSRLFNMDCPNHGFKVGMKLEAVDLMEPRLICVATVKRVVHRLLSIHFDGWDSEYDQWVDCESPDIYPVGWCELTGYQLQPPVAAGVGSRGPKRL

SEQ ID NO: 4245 - protein, 54 aa, Homo sapiens
VGGRPHQAAPSPLRPCPSSPHHRPGVRTQAHVLQPPEAPLKPGLPFPHPHGSPG

SEQ ID NO: 4246 - protein, 25 aa, Homo sapiens
LPWPDLGRPQTLTFSCVGRLLLRKQ

SEQ ID NO: 4247 - protein, 1248 aa, Homo sapiens
VPRGSYRRGDRPGLAWTMVLLWEPAGAWLALGLALALGPSVAAAAPRQDCTGVECPPLENCIEEALEPGACCATCVQQGCACEGYQYYDCLQGGFVRGRVPAGQSYFVDFGSTECSCPPGGGKISCQFMLCPELPPNCIEAVVVADSCPQCGQVGCVHAGHKYAAGHTVHLPPCRACHCPDAGGELICYQLPGCHGNFSDAEEGDPERHYEDPYSYDQEVAEVEAATALGGEVQAGAVQAGAGGPPAALGGGSQPLSTIQAPPWPAVLPRPTAAAALGPPAPVQAKARRVTEDSEEEEEEEEEREEMAVTEQLAAGGHRGLDGLPTTAPAGPSLPIQEERAEAGARAEAGARPEENLILDAQATSRSTGPEGVTHAPSLGKAALVPTQAVPGSPRDPVKPSPHNILSTSLPDAAWIPPTREVPRKPQVLPHSHVEEDTDPNSVHSIPRSSPEGSTKDLIETCCAAGQQWAIDNDECLEIPESGTEDNVCRTAQRHCCVSYLQEKSCMAGVLGAKEGETCGAEDNDSCGISLYKQCCDCCGLGLRVRAEGQSCESNPNLGYPCNHVMLSCCEGEEPLIVPEVRRPPEPAAAPRRVSEAEMAGREALSLGTEAELPNSLPGDDQDECLLLPGELCQHLCINTVGSYHCACFPGFSLQDDGRTCRPEGHPPQPEAPQEPALKSEFSQVASNTIPLPLPQPNTCKDNGPCKQVCSTVGGSAICSCFPGYAIMADGVSCEDQDECLMGAHDCSRRQFCVNTLGSFYCVNHTVLCADGYILNAHRKCVDINECVTDLHTCSRGEHCVNTLGSFHCYKALTCEPGYALKDGECEDVDECAMGTHTCQPGFLCQNTKGSFYCQARQRCMDGFLQDPEGNCVDINECTSLSEPCRPGFSCINTVGSYTCQRNPLICARGYHASDDGTKCVDVNECETGVHRCGEGQVCHNLPGSYRCDCKAGFQRDAFGRGCIDVNECWASPGRLCQHTCENTLGSYRCSCASGFLLAADGKRCEDVNECEAQRCSQECANIYGSYQCYCRQGYQLAEDGHTCTDIDECAQGAGILCTFRCLNVPGSYQCACPEQGYTMTANGRSCKDVDECALGTHNCSEAETCHNIQGSFRCLRFECPPNYVQVSKTKCERTTCHDFLECQNSPARITHYQLNFQTGLLVPAHIFRIGPAPAFTGDTIALNIIKGNEEGYFGTRRLNAYTGVVYLQRAVLEPRDFALDVEMKLWRQGSVTTFLAKMHIFFTTFAL

SEQ ID NO: 4248 - protein, 1201 aa, Homo sapiens
VPRGSYRRGDRPGLAWTMVLLWEPAGAWLALGLALALGPSVAAAAPRQDCTGVECPPLENCIEEALEPGACCATCVQQGCACEGYQYYDCLQGGFVRGRVPAGQSYFVDFGSTECSCPPGGGKISCQFMLCPELPPNCIEAVVVADSCPQCGQVGCVHAGHKYAAGHTVHLPPCRACHCPDAGGELICYQLPGCHGNFSDAEEGDPERHYEDPYSYDQEVAEVEAATALGGEVQAGAVQAGAGGPPAALGGGSQPLSTIQAPPWPAVLPRPTAAAALGPPAPVQAKARRVTEDSEEEEEEEEEREEMAVTEQLAAGGHRGLDGLPTTAPAGPSLPIQEERAEAGARAEAGARPEENLILDAQATSRSTGPEGVTHAPSLGKAALVPTQAVPGSPRDPVKPSPHNILSTSLPDAAWIPPTREVPRKPQVLPHSHVEEDTDPNSVHSIPRSSPEGSTKDLIETCCAAGQQWAIDNDECLEIPESGTEDNVCRTAQRHCCVSYLQEKSCMAGVLGAKEGETCGAEDNDSCGISLYKQCCDCCGLGLRVRAEGQSCESNPNLGYPCNHVMLSCCEGEEPLIVPEVRRPPEPAAAPRRVSEAEMAGREALSLGTEAELPNSLPGDDQDECLLLPGELCQHLCINTVGSYHCACFPGFSLQDDGRTCRPEGHPPQPEAPQEPALKSEFSQVASNTIPLPLPQPNTCKDNGPCKQVCSTVGGSAICSCFPGYAIMADGVSCEDINECVTDLHTCSRGEHCVNTLGSFHCYKALTCEPGYALKDGECEDVDECAMGTHTCQPGFLCQNTKGSFYCQARQRCMDGFLQDPEGNCVDINECTSLSEPCRPGFSCINTVGSYTCQRNPLICARGYHASDDGTKCVDVNECETGVHRCGEGQVCHNLPGSYRCDCKAGFQRDAFGRGCIDVNECWASPGRLCQHTCENTLGSYRCSCASGFLLAADGKRCEDVNECEAQRCSQECANIYGSYQCYCRQGYQLAEDGHTCTDIDECAQGAGILCTFRCLNVPGSYQCACPEQGYTMTANGRSCKDVDECALGTHNCSEAETCHNIQGSFRCLRFECPPNYVQVSKTKCERTTCHDFLECQNSPARITHYQLNFQTGLLVPAHIFRIGPAPAFTGDTIALNIIKGNEEGYFGTRRLNAYTGVVYLQRAVLEPRDFALDVEMKLWRQGSVTTFLAKMHIFFTTFAL

SEQ ID NO: 4249 - protein, 89 aa, Homo sapiens
MGLAEGNRRAARRRRRQVARSRAGAGPGHGRLGAAVRVVAALLRAEGPGLPAAVAEGLCRCLQEEHLTVLSGATKARGGRCRGPAATTG

SEQ ID NO: 4250 - protein, 121 aa, Homo sapiens
LRAWVSSMWPGLTCYPPHWVRTQRLLSGPWVPGSGVSGQALAVAPDGKLLFSGGHWDGSLRVTALPRGKLLSQLSCHLDVVTCLALDTCGIYLISGSRDTTCMVWRLLHQVCLVGSSVGPP

SEQ ID NO: 4251 - protein, 29 aa, Homo sapiens
LSRLSDAGAERPGRKGVQPVVCKALVGTC

SEQ ID NO: 4252 - protein, 48 aa, Homo sapiens
LGHWSHHVHPVSGQMDKQACSQMGWGHVSVAFLCDPSPMQAFRQSTFL

SEQ ID NO: 4253 - protein, 52 aa, Homo sapiens [sequence omitted]

SEQ ID NO: 4254 - protein, 176 aa, Homo sapiens
LSSGPVLIYPCQCFVIIMSWRISPATPCCRELTFHLCIFCLETAYCRVGLGICYDMRFAELAQIYAQRGCQLLVYPGAFNLTTGPAHWELLQRSRAVDNQVYVATASPARDDKASYVAWGHSTVVNPWGEVLAKAGTEEAIVYSDIDLKKLAEIRQQIPVFRQKRSDLYAVEMKKP

SEQ ID NO: 4255 - protein, 340 aa, Homo sapiens
LYLSSTVSPGIISLSTRSLRRYGELANTPFGLFLPPCFCVPWECCCAYASGLFLELQWTGICDSTMGLSNILFVMAFLLSGAAPLKIQAYFNETADLPCQFANSQNQSLSELVVFWQDQENLVLNEVYLGKEKFDSVHSKYMGRTSFDSDSWTLRLHNLQIKDKGLYQCIIHHKKPTGMIRIHQMNSELSVLANFSQPEIVPISNITENVYINLTCSSIHGYPEPKKMSVLLRTKNSTIEYDGVMQKSQDNVTELYDVSISLSVSFPDVTSNMTIFCILETDKTRLLSSPFSIGTNTMEREESEQTKKREKIHIPERSDEAQRVFKSSKTSSCDKSDTCF

SEQ ID NO: 4256 - protein, 38 aa, Homo sapiens
VLFLPTRDHGAVAPYGAMIPRPGPGPAYGPELPWECQC

SEQ ID NO: 4257 - protein, 84 aa, Homo sapiens
LKMWQRPEPGERLNPFGQGEGERGKGLVLLFKQEEDYKPPSTICQALEFEPPSSGVTQMQRKPGLLLTFLRGGKSINGDPHMYK

SEQ ID NO: 4258 - protein, 119 aa, Homo sapiens
MHTHTHARPHRPTRTHSCPRPRSAPGSPVRARARKDTEKPPAESAAAPWDAALSRRCCLGLVSACGPSAGDGPGLSTTAPPGIRSGCDGRNVNGHQNGYCRAGLDGQSCVRVGRSQWLR

SEQ ID NO: 4259 - protein, 34 aa, Homo sapiens
LGMQILENRLYFAEGSGCHEHVSSKRGFHYPGNV

SEQ ID NO: 4260 - protein, 58 aa, Homo sapiens
VCLVRVKDEVISHIVYIVKQHTQKFLSHKTSTYCMLTRRKDNIFRKSTAHCCLYTLYI

SEQ ID NO: 4261 - protein, 198 aa, Homo sapiens
LLVEDAEGPTPLVSGLLAASGLLFTHLVVLTPKAQRLREGKPGWVHPHGVEQRNKALDWLRGRGSAVGGKKDPSPPGTQGVVYFADSGNTYSWELFEEMRWTRGVSVWPVGLVGGLRVKGPQVQDSRVVGFHTAWEPNGPFPVDMAGFAVALPLLLAKPNAQFDSTAPRSHLESSLLSHLVDPKDLEPRAANCTRVLV

SEQ ID NO: 4262 - protein, 232 aa, Homo sapiens [sequence omitted]

SEQ ID NO: 4263 - protein, 550 aa, Homo sapiens
LRRRGRCKGRREAASGGSLFPQKLLNAETSQSGIRDAESTMDGFYDQQVPFMVPGKSRSEECRGRPVIDRKRKFLDTDLAHDSEELFQDLSQLQEAWLAEAQVPDDEQFVPDFQSDNLVLHAPPPTKIKRELHSPSSELSSCSHEQALGANYGEKCLYNYCAYDRKPPSGFKPLTPPTTPLSPTHQNPLFPPPQATLPTSGHAPAAGPVQGVGPAPAPHSLPEPGPQQQTFAVPRPPHQPLQMPKMMPENQYPSEQRFQRQLSEPCHPFPPQPGVPGDNRPSYHRQMSEPIVPAAPPPPQGFKQEYHDPLYEHGVPGMPGPPAHGFQSPMGIKQEPRDYCVDSEVPNCQSSYMRGGYFSSSHEGFSYEKDPRLYFDDTCVVPERLEGKVKQEPTMYREGPPYQRRGSLQLWQFLVTLLDDPANAHFIAWTGRGMEFKLIEPEEVARRWGIQKNRPAMNYDKLSRSLRYYYEKGIMQKVAGERYVYKFVCDPDALFSMAFPDNQRPFLKAESECHLSEEDTLPLTHFEDSPAYLLDMDRCSSLPYAEGFAY

SEQ ID NO: 4264 - protein, 126 aa, Homo sapiens
LRRRGRCKGRREAASGGSLFPQKLLNAETSQSGIRDAESTMDGFYDQQVPFMVPGKSRSEECRGRPVIDRKRKFLDTDLAHDSEELFQDLSQLQEAWLAEAQVPDDEQFVPDFQSDNRKMSCFPLS

SEQ ID NO: 4265 - protein, 37 aa, Homo sapiens
MQCSLLLNRRSQRALCFFLWEYLNLVSMLITDQKYRF

SEQ ID NO: 4266 - protein, 126 aa, Homo sapiens
LSVTAAPAGRAAAGERLGGLRWEHTFGQRHQVTRTPRGGPLPASPRPSPPTPSPAAPAGRGPASPFCSRRPPGAQTWKPRSSRGRPVRPLLSNQRAVWARPGAAQRSDCRGQGRSLLWGSRRCLES

SEQ ID NO: 4267 - protein, 113 aa, Homo sapiens
LGCPEKPTSPLRGPGRPPTPLTMLGPQPDLPCVPRSVLRSGCRAVAWRKPGRCHQSFGEGEALSGKPSGSHEGGNTCGALVGGGAALQRSKKKFQKNEQQPPRPGIGAGDKGS

SEQ ID NO: 4268 - protein, 137 aa, Homo sapiens
LIPGMELGASSSVPRAPGVQPKAPILLVGVFSITLKTRANLLLHTPQIQKVPGNVDEVLKETTGLVSHVHTEKKTSHFYFYFLRQSFALVAQAGVQWCNFSSLQSLPPGFKQFSCLSLPSSWNCRHPSPRPANFMYF

SEQ ID NO: 4269 - protein, 37 aa, Homo sapiens
LGSGSVTSKAMRVVRPCLVSRPPITDRAGTAGPNALR

SEQ ID NO: 4270 - protein, 10 aa, Homo sapiens
LCMGDHSSVT

SEQ ID NO: 4271 - protein, 53 aa, Homo sapiens
LDLRVGLGGRITPRPQPRGPGVNRALRAGNPGFSQIPPDPPLLGKRRLPSGGC

SEQ ID NO: 4272 - protein, 97 aa, Homo sapiens [sequence omitted]

SEQ ID NO: 4273 - protein, 30 aa, Homo sapiens
MLPSWGADISLWNSGKTTGTFFGADRFAST

SEQ ID NO: 4274 - protein, 70 aa, Homo sapiens
LGPQFSSSGSKEETAFQAVIPKQIERKTCDPKVKFVKNIDLFNQLHFLFCLKQKNKKTSIRVFTGRRLVA

SEQ ID NO: 4275 - protein, 46 aa, Homo sapiens
LRGQDCRAFKPVQLPGFDPKSLIIVIAHRDCVKNSGGLLLKRMRVL

SEQ ID NO: 4276 - protein, 180 aa, Homo sapiens [sequence omitted]

SEQ ID NO: 4277 - protein, 98 aa, Homo sapiens
VRGARHPLGPRCASTTCGAAVPTPCRDPAAPAPSTRGQTKQVAGRCRRRGPGGSLTLILLSGLGSSGRGVREDQRTTSPRKLPTTSKLRGEFVTERPR

SEQ ID NO: 4278 - protein, 29 aa, Homo sapiens
LKPESETSDKGVITVSPFNMPSVSIRITL

SEQ ID NO: 4279 - protein, 200 aa, Homo sapiens
VHADKHTERGPRGPHQGSTDKHTERGPRGRRQGSTDKHTERGPRGPRQGSTDKHTERGPRGRRQGSTDKHTERGPCGRRQGSADKHTGEGSAWASSGKYRQAHREGAAWAPSGKCGQAHGEGAAWAPSGKCRWKPQRGPCTLSRGLRQSNKLPAPRAEQAAGWGPRPHPAEQRGRATVDSFSSQPKVAQQSRSWVLAQEK

SEQ ID NO: 4280 - protein, 33 aa, Homo sapiens
VRLRMLGRCSVSAAWLLLNGMTAFTAPCACLSI

SEQ ID NO: 4281 - protein, 52 aa, Homo sapiens
LKSVILPPVQRVRWPSADESLRASVRGASVVEAALVSDRSHSLRLRIPRSYT

SEQ ID NO: 4282 - protein, 121 aa, Homo sapiens
LKEATATSGWPRGALARLFLRPRGPRSPIIQFRRVTGAAVASQGAGSLSPALLPLAPSPRPRRAGLRGQGPSGEGVLLCRPGWSAVARSRLTATSASRVKAILLPQPPELLGLQVPATTLS

SEQ ID NO: 4283 - protein, 82 aa, Homo sapiens
LKEATATSGWPRGALARLFLRPRGPRSPIIQFRRVTGAAVASQGAGSLSPALLPLAPSPRPRRAGLRGQGPSGEGRDGVSPC

SEQ ID NO: 4284 - protein, 48 aa, Homo sapiens
LGGTSLSKFEDCAWKLLYMYLGCMSICTKLDFQKSLYWKVNNLYLLRT

SEQ ID NO: 4285 - protein, 84 aa, Homo sapiens
MPLGLCSHDLIGRPSVMELDPGASCLWHWLEASKPLHFCVYSPESHHGARPWPPTLLLNTGIFFFTNGISWFPLPPLSHKTIGN

SEQ ID NO: 4286 - protein, 23 aa, Homo sapiens
LIPLHLILSGIGRSVHNELEKRR

SEQ ID NO: 4287 - protein, 321 aa, Homo sapiens
MSAAGLLAPAPPGLERPRGGRRAGERQGRRAQLPGRESDEDTEDASETDLAKHDEEDYGEVKEQMYQDKLASLERQLQQLQEGTLQEYQKRMKKLGQQYKERIRNAELFLQLETEQVGRNYMKEKKAAVKEFEDKKVELKENLIAELAEEKKMIENEMLTMELNGDSMQVRPIMTRKLRRRPNDPVPIPDKRRKPAPAQLNYLLTDEQIMEDLRTLNKLKSPKRPASPSSPEHLPATPAESPAQRFEARIEDGKLHYDKRWYHKSQAIYLESKDNQKLSCVISSVGANEIWVRKTSDSTKMRIYLGQLQRGLFVIHRRSAA

SEQ ID NO: 4288 - protein, 21 aa, Homo sapiens
LSENRRVSRPTENPARLLGMN

SEQ ID NO: 4289 - protein, 119 aa, Homo sapiens
LSPPAGRRMYPTAPELLVPQPRPQGSPASLLLGTPVLAAVYGASCLPLGRHPCTPASFPWPFLAPVLLLYIDLFTQKRARPLFSATSPVSEIQPPRLHRKIDILEIMKSDIFAYERKKG

SEQ ID NO: 4290 - protein, 56 aa, Homo sapiens
LGLCEGKRQSVPHRLEAATLETSEYPQVTPRRGWCACQLFWALSEAGETIVEAVLG

SEQ ID NO: 4291 - protein, 175 aa, Homo sapiens
MGPRARPALLLLMLLQTAVLQGRLLRSHSLHYLFMGASEQDLGLSLFEALGYVDDQLFVFYDHESRRVEPRTPWVSSRISSQMWLQLSQSLKGWDHMFTVDFWTIMENHNHSKGMWRGGLTFLRLSELFIFSCILKETAGSLRSCGSREEGRNLLPEIIWSLGMVEIGTYSFGCS

SEQ ID NO: 4292 - protein, 208 aa, Homo sapiens
LLWVLMEPAAALHFSRPASLLLLLSLCALVSAQVTVVGPTDPILAMVGENTTLRCCLSPEENAEDMEVRWFQSQFSPAVFVYKGGRERTEEQKEEYRGRTTFVSKDSRGSVALIIHNVTAEDNGIYQCYFQEGRSCNEAILHLVVAGALLHFALLLWHCVTLGKASLLNSSPLQTSTILFPGSPFRRDTLPMKRRFQGKILPPAQGPP

SEQ ID NO: 4293 - protein, 134 aa, Homo sapiens
LALAVPVSSSQYSGPSCSIHGARGSILGLVASLSSRTHCVSSTSPTERKRGSARPGRDMVVWKYLKEWKPGSKEGAETLPTLLPAPQPGSCAPAGQAPSYSPQTPFPSRPRTHLPRSGSGPGPPRAAEAGFGAP

SEQ ID NO: 4294 - protein, 221 aa, Homo sapiens
MVLMAPRTLLLLLSGALALTLTQTWARSHSMRYFYTTMSRPGRGEPRFISVGYVDDTQFVRFDSDDASPREEPRAPWMEREGPEYWDRNTQICKAQAQTERENLRIALRYYNQSEGGSHTMQVMYGCDVGPDGRFLRGYEQHAYDGKDYIALNEDLRSWTAADMAAQITKRKWEAARRAEQLRAYLEGEFVEWLRRYLENGKETLQRADPPQDTYDPPPHL

SEQ ID NO: 4295 - protein, 169 aa, Homo sapiens
MGRGRDLRPGPGSLTALALVVVAERDPQVLSFSLCLGLADLCVPVPILWPLPLHPRRPRLLSRTRVVAVEPHELRIVHVADGDEAGLPAAGPGHGGVEIPHGVGAWERGGAETGPTLLPARIPGSCAPAGRAPRSSRPFPCRPCTHAPRSGSGSGPGPLRAAGGGFGAP

SEQ ID NO: 4296 - protein, 96 aa, Homo sapiens
LRVVHVAHGDEAGLPAAGPGHGCEEIPHGVGAWGRAVAETCPTLVPARLPRSCAPARRAPCFSPQRRFPSRPRTHPPRSGSGPGPPRVAGGGFGAP

SEQ ID NO: 4297 - protein, 367 aa, Homo sapiens
LTEWTWGPCAATTTRARPVSDPGRGRRSGPLIPHGRARSPTVSGSEIHPEAAGPRDPCPGRGPGAFTRFHFQFRPKIPPGWSGLGGARGTGLTAGSGPGSHTIQIMYGCDVGSDGRFLRGYRQDAYDGKDYIALNEDLRSWTAADMAAQITKRKWEAAHEAEQLRAYLDGTCVEWLRRYLENGKETLQRTDPPKTHMTHHPISDHEATLRCWALGFYPAEITLTWQRDGEDQTQDTELVETRPAGDGTFQKWAAVVVPSGEEQRYTCHVQHEGLPKPLTLRWELSSQPTIPIVGIIAGLVLLGAVITGAVVAAVMWRRKSSEKEGVTLRLQAVTVPRALMCPSQLVKCETAALCGTERQELFLPFPL

SEQ ID NO: 4298 - protein, 53 aa, Homo sapiens
VSALSGCLHNQFLLACADFEGKVVKTSVVFHQLGTAMPMSVEEGPECQGPVVS

SEQ ID NO: 4299 - protein, 59 aa, Homo sapiens
LLNLTGSFCSPVLPSHCGLQIPGNPSPCDLMVCSVLHPRDQKEPGVKNWLTWPPLGNSG

SEQ ID NO: 4300 - protein, 67 aa, Homo sapiens [sequence omitted]

SEQ ID NO: 4301 - protein, 874 aa, Homo sapiens
LESQPHRGSPPPEAEIAPGAATVAVTATAMPKAPKQQPPEPEWIGDGESTSPSDKVVKKGKKDKKIKKTFFEELAVEDKQAGEEEKVLKEKEQQQQQQQQQQKKKRDTRKGRRKKDVDDDGEEKELMERLKKLSVPTSDEEDEVPAPKPRGGKKTKGGNVFAALIQDQSEEEEEEEKHPPKPAKPEKNRINKAVSEEQQPALKGKKGKEEKSKGKAKPQNKFAALDNEEEDKEEEIIKEKEPPKQGKEKAKKAEQGSEEEGEGEEEEEEGGESKADDPYAHLSKKEKKKLKKQMEYERQVASLKAANAAENDFSVSQAEMSSRQAMLENASDIKLEKFSISAHGKELFVNADLYIVAGRRYGLVGPNGKGKTTLLKHIANRALSIPPNIDVLLCEQEVVADETPAVQAVLRADTKRLKLLEEERRLQGQLEQGDDTAAERLEKVYEELRATGAAAAEAKARRILAGLGFDPEMQNRPTQKFSGGWRMRVSLARALFMEPTLLMLDEPTNHLDLNAVIWLNNYLQGWRKTLLIVSHDQGFLDDVCTDIIHLDAQRLHYYRGNYMTFKKMYQQKQKELLKQYEKQEKKLKELKAGGKSTKQAEKQTKEALTRKQQKCRRKNQDEESQEAPELLKRPKEYTVRFTFPDPPPLSPPVLGLHGVTFGYQGQKPLFKNLDFGIDMDSRICIVGPNGVGKSTLLLLLTGKLTPTHGEMRKNHRLKIGFFNQQYAEQLRMEETPTEYLQRGFNLPYQDARKCLGRFGLESHAHTIQICKLSGGQKARVVFAELACREPDVLILDEPTNNLDIESIDALGEAINEYKGAVIVVSHDARLITETNCQLWVVEEQSVSQIDGDFEDYKREVLEALGEVMVSRPRE

SEQ ID NO: 4302 - protein, 836 aa, Homo sapiens
LESQPHRGSPPPEAEIAPGAATVAVTATAMPKAPKQQPPEPEWIGDGESTSPSDKVVKKGKKDKKIKKTFFEELAVEDKQAGEEEKVLKEKEQQQQQQQQQQKKKRDTRKGRRKKDVDDDGEEKELMERLKKLSVPTSDEEDEVPAPKPRGGKKTKGGNVFAALIQDQSEEEEEEEKHPPKPAKPEKNRINKAVSEEQQPALKGKKGKEEKSKGKAKPQNKFAALDNEEEDKEEEIIKEKEPPKQGKEKAKKAEQMEYERQVASLKAANAAENDFSVSQAEMSSRQAMLENASDIKLEKFSISAHGKELFVNADLYIVAGRRYGLVGPNGKGKTTLLKHIANRALSIPPNIDVLLCEQEVVADETPAVQAVLRADTKRLKLLEEERRLQGQLEQGDDTAAERLEKVYEELRATGAAAAEAKARRILAGLGFDPEMQNRPTQKFSGGWRMRVSLARALFMEPTLLMLDEPTNHLDLNAVIWLNNYLQGWRKTLLIVSHDQGFLDDVCTDIIHLDAQRLHYYRGNYMTFKKMYQQKQKELLKQYEKQEKKLKELKAGGKSTKQAEKQTKEALTRKQQKCRRKNQDEESQEAPELLKRPKEYTVRFTFPDPPPLSPPVLGLHGVTFGYQGQKPLFKNLDFGIDMDSRICIVGPNGVGKSTLLLLLTGKLTPTHGEMRKNHRLKIGFFNQQYAEQLRMEETPTEYLQRGFNLPYQDARKCLGRFGLESHAHTIQICKLSGGQKARVVFAELACREPDVLILDEPTNNLDIESIDALGEAINEYKGAVIVVSHDARLITETNCQLWVVEEQSVSQIDGDFEDYKREVLEALGEVMVSRPRE

SEQ ID NO: 4303 - protein, 138 aa, Homo sapiens
LLGSTLHFPSVHRSQLIMQAEAEAASVRMRGEAEAFAIGARARAEAEQMAKKAEAFQLYQEAAQLDMLLEKLPQVAEEISGPLTSANKITLVSSGSGTMGAAKVTGEVLDILTRLPESVERLTGVSISQVNHKPLRTA

SEQ ID NO: 4304 - protein, 128 aa, Homo sapiens
MFFTCGPNEAMVVSGFCRSPPVMVAGGRVFVLPCIQQIQRISLNTLTLNVKSEKVYTRHGVPISVTGIAQVKLSEPFPHSPLPHHPLSQTLRHLLATVFSTLACREVPLLVSSFPGTPRHLPPPPFFP

SEQ ID NO: 4305 - protein, 71 aa, Homo sapiens
LDSRQSEEVSVSKRHMDATDKIKFPWLKEKRTIEFGEAAGYVCHRRYKDMEPHEKMGEAAKKVHWVQVRSR

SEQ ID NO: 4306 - protein, 75 aa, Homo sapiens
MASRRLCSQPSMQRPSGFEMQQKPSPPDRGLHASGQSTAPPSPSPRRRSLSGWTQPELTHKQTKKVTLKELSVGL

SEQ ID NO: 4307 - protein, 49 aa, Homo sapiens
MQRPSGFEMQQKPSPPDRGLHASGQSTAWEELVCSQAVLHPVLTLALVI

SEQ ID NO: 4308 - protein, 701 aa, Homo sapiens
LNWSVFVSPLVQGNIDGWRQNLEPSNNVEMFPPSGSTGLIPPSHFQARPLSTLPRMAPTWLSDIPLVQPPGHQDVSERRLDTQRPQVTMWERDVSSDRQEPGRRGRSWGLEGSQALSQQAEVIVRQLQELRRLEEEVRLLRETSLQQKMRLEAQAMELEALARAEKAGRAEAEGLRAALAGAEVVRKNLEEGSQRELEEVQRLHQEQLSSLTQAHEEALSSLTSKAEGLEKSLSSLETRRAGEAKELAEAQREAELLRKQLSKTQEDLEAQVTLVENLRKYVGEQVPSEVHSQTWELERQKLLETMQHLQEDRDSLHATAELLQVRVQSLTHILALQEEELTRKVQPSDSLEPEFTRKCQSLLNRWREKVFALMVQLKAQELEHSDSVKQLKGQVASLQEKVTSQSQEQAILQRSLQDKAAEVEVERMGAKGLQLELSRAQEARRRWQQQTASAEEQLRLVVNAVSSSQIWLETTMAKVEGAAAQLPSLNNRLSYAVRKVHTIRGLIARKLALAQLRQESCPLPPPVTDVSLELQQLREERNRLDAELQLSARLIQQEVGRAREQGEAERQQLSKVAQQLEQELQQTQESLASLGLQLEVARQGQQESTEEAASLRQELTQQQELYGQGVEREMGASLGGWGGNCESKLLLICPVCTFTPALQEKVAEVETRLREQLSDTERRLNEARREHAKAGEPCQGG

SEQ ID NO: 4309 - protein, 419 aa, Homo sapiens
VTVYNPIQKRPDFKQQQDCFRSILGPANIKKATGETERLSESLKLRYEEVEIWKKLEEKDRQGEAQWLQQKRQETGREDGSTLAKGSLEIVLDSKDKTQKSNGEKNEKCETKEKGAITAKELYTMMMDKNISLIIMDAQRMQDYQDSCILHSLSVPEEAISPGVTASWIEAHLPDDSIDTWKKRGNVEYMVLLDWFSSAKDLQIRTTLWHLKDALFKWESKTVLCNGPWALVLEGGCKNWFLCYSQYTTNAKVTPPPQHQNEELSISLDFTYPSLEESIPSKPAAQMPPPHIEVDENIELISDQISDNDQNERTGPLNISIPVEPVAASKSDVSPIIQPVPSIKNVPQIDHTKKLAVKLPEEHIIKSESTNHEQQSPQNEKVIPDCSAKPVVSSPTLMLTDEEKAHIHAETALLMEKNK

SEQ ID NO: 4310 - protein, 269 aa, Homo sapiens
LPWKRSSRHRGKVKSFPKDDPSKPVHLTAFLGYKAGMTHIVREVDRPGSKVNKKEVVEAVTIVERPPVGIVGCVETPQGFRTCKTVFAEHISDECKRHFYKNWHKSKKKAFTKYCKKWQDEDGKKQLEKDFSSMKKYCQVICVIAHTQMQLLPLCQKKAHLMEIQVNGGTVAEKLDWAGERLKHQVPVNQVFGQDEMIDVIRVTKGKGYKRVTSRWHTKKLPRKTHQGLCKVACIGAWHPARVGFSVVRGGQKGYHHRTEINKKIYRIG

SEQ ID NO: 4311 - protein, 13 aa, Homo sapiens
VVGVGVWRSSPTP

SEQ ID NO: 4312 - protein, 164 aa, Homo sapiens
MPGPCVCTYKVKVLNLAPRKHPHLGIACNSRYFVHLCFYFRSWDSYIHQNSTVSRPSPPESLGDTVLWRRVRLEEALTPGLLILPTQSEAEKKCRTLHFLLGPDREARATMDVKFRQGNTSIAKSPHHILKLTQWLKENPHQKTEFLAQVRSPKLPVRLRGTCR

SEQ ID NO: 4313 - protein, 23 aa, Homo sapiens
MEESEIGGSPDSRSPDPSYTKRS

SEQ ID NO: 4314 - protein, 69 aa, Homo sapiens
VSPRFLVLKSSPAHRDSDSPQTPRLRVMESRTLLLLFSGAVALIQTWADYNYNQGRNDLIFTLQLWKRQ

SEQ ID NO: 4315 - protein, 132 aa, Homo sapiens
MLLRMSEHRNEALGNYLEMRLKSSFLRGLGSWKSNPLRLGGWTILLTLTMGQGEPGGPQGDPWVPHELLLPSLCDSSHASSWGSGSITCAWRGGDSSSHPLVSGHILSNSPVAAVMCSSMGTHLSPFKGTLL

SEQ ID NO: 4316 - protein, 31 aa, Homo sapiens
MSLIFKMHHVLKDGTLPPAECFLQAGVELCL

SEQ ID NO: 4317 - protein, 256 aa, Homo sapiens
VRLSCPISLGCPCFVLWTTAQQCPALCLGLGPSCTCCLDPRPAWAWALVLPMTPPERLFLPRVCGTTLHLLLLGLLLVLLPGAQGLPGVGLTPSAAQTARQHPKMHLAHSTLKPAAHLIGDPSKQNSLLWRANTDRAFLQDGFSLSNNSLLVPTSGIYFVYSQVVFSGKAYSPKATSSPLYLAHEVQLFSSQYPFHVPLLSSQKMVYPGLQEPWLHSMYHGAAFQLTQGDQLSTHTDGIPHLVLSPSTVFFGAFAL

SEQ ID NO: 4318 - protein, 38 aa, Homo sapiens
LTSPPAASVLSPQGGKHLMLEVPGSCGPWQVMCESRVS

SEQ ID NO: 4319 - protein, 32 aa, Homo sapiens
LTSPPAASVLSPQGGKHLMLEVPGSCGPWQVM

SEQ ID NO: 4320 - protein, 189 aa, Homo sapiens
LVGNPFLSPLLKTLQSALIPSALSPHPEKYMEFDLNGNGDIGEKRVICGGRVVCRPKKTEVSPTCSIPHDLGGGPPTTVGGRRMGMRKWERRERVSPPSPHPHPLPPDIMSLKRMLEKLGVPKTHLELKKLIGEVSSGSGETFSYPDFLRMMLGKRSAILKMILMYEEKAREKEKPTGPPAKKAISELP

SEQ ID NO: 4321 - protein, 123 aa, Homo sapiens
LVGNPFLSPLLKTLQSALIPSALSPHPEKYMEFDLNGNGDIDIMSLKRMLEKLGVPKTHLELKKLIGEVSSGSGETFSYPDFLRMMLGKRSAILKMILMYEEKAREKEKPTGPPAKKAISELP

SEQ ID NO: 4322 - protein, 186 aa, Homo sapiens
VPGFPTAPTRVVIARPTPPQARPSHPGGPPVSGTLQGAGLGTNASLAQMVSGLVGQLLMQPVLVAQGTPGMAPPPAPATASASAGTTNTATTAGPAPGGPAQPPPTPQPSMADLQFSQLLGNLLGPAGPGAGGSGVASPTITVAMPGVPAFLQGMTDFLQVSGWLAIHLIFLSPGPARQWYLLAII

SEQ ID NO: 4323 - protein, 34 aa, Homo sapiens
LGISEDILVLTLWRPRLCCVFAGQSGHFVEIIAL

SEQ ID NO: 4324 - protein, 143 aa, Homo sapiens
LDTWFSSGLFPLSILGWPNQVCSWGRGLAGQGTGGWVLAPLHTLVCPQSEDLSVFYPGTLLETGHDILFFWVARMVMLGLKLTGRLPFREVRRQPRPSHRPQPPLLPSCAAAQTPRGWGMGLAVGRPDPGAGVGLKSSLGPAQ

SEQ ID NO: 4325 - protein, 709 aa, Homo sapiens
LRSCCDSPLPFSRVTPVVPRLPRANLCGCRHRRVEFPASGRTELFSRIQCSVSSPQSQSGADREQGTGMAKAAAIGIDLGTTYSCVGVFQHGKVEIIANDQGNRTTPSYVAFTDTERLIGDAAKNQVALNPQNTVFDAKRLIGRKFGDPVVQSDMKHWPFQVINDGDKPKVQVSYKGETKAFYPEEISSMVLTKMKEIAEAYLGYPVTNAVITVPAYFNDSQRQATKDAGVIAGLNVLRIINEPTAAAIAYGLDRTGKGERNVLIFDLGGGTFDVSILTIDDGIFEVKATAGDTHLGGEDFDNRLVNHFVEEFKRKHKKDISQNKRAVRRLRTACERAKRTLSSSTQASLEIDSLFEGIDFYTSITRARFEELCSDLFRSTLEPVEKALRDAKLDKAQIHDLVLVGGSTRIPKVQKLLQDFFNGRDLNKSINPDEAVAYGAAVQAAILMGDKSENVQDLLLLDVAPLSLGLETAGGVMTALIKRNSTIPTKQTQIFTTYSDNQPGVLIQVYEGERAMTKDNNLLGRFELSGIPPAPRGVPQIEVTFDIDANGILNVTATDKSTGKANKITITNDKGRLSKEEIERMVQEAEKYKAEDEVQRERVSAKNALESYAFNMKSAVEDEGLKGKISEADKKKVLDKCQEVISWLDANTLAEKDEFEHKRKELEQVCNPIISGLYQGAGGPGPGGFGAQGPKGGSGSGPTIEEVD

SEQ ID NO: 4326 - protein, 544 aa, Homo sapiens
LRSCCDSPLPFSRVTPVVPRLPRANLCGCRHRRVEFPASGRTELFSRIQCSVSSPQSQSGADREQGTGMAKAAAIGIDLGTTYSCVGVFQHGKGERNVLIFDLGGGTFDVSILTIDDGIFEVKATAGDTHLGGEDFDNRLVNHFVEEFKRKHKKDISQNKRAVRRLRTACERAKRTLSSSTQASLEIDSLFEGIDFYTSITRARFEELCSDLFRSTLEPVEKALRDAKLDKAQIHDLVLVGGSTRIPKVQKLLQDFFNGRDLNKSINPDEAVAYGAAVQAAILMGDKSENVQDLLLLDVAPLSLGLETAGGVMTALIKRNSTIPTKQTQIFTTYSDNQPGVLIQVYEGERAMTKDNNLLGRFELSGIPPAPRGVPQIEVTFDIDANGILNVTATDKSTGKANKITITNDKGRLSKEEIERMVQEAEKYKAEDEVQRERVSAKNALESYAFNMKSAVEDEGLKGKISEADKKKVLDKCQEVISWLDANTLAEKDEFEHKRKELEQVCNPIISGLYQGAGGPGPGGFGAQGPKGGSGSGPTIEEVD

SEQ ID NO: 4327 - protein, 183 aa, Homo sapiens
LAQNLALEGLRGHLLSDKGNGEMTVVGAAEVTQSIRPEEELLPAQDIKALFVSEEEKKLTRKEVYIKNGDKKGSCERDAQYAPGYDKVKDISEVVTPRFLCTGGVSPYADPNTCRGDSGGPLIVHKRSRFIQVGVISWGVVDVCKNQKRQKQVPAHARDFHINLFQVLPWLKEKLQDEDLGFL

SEQ ID NO: 4328 - protein, 711 aa, Homo sapiens
LVGGWGGKMAELMLLSEIADPTRFFTDNLLSPEDWGLQNSTLYSGLDEVAEEQTQLFRCPEQDVPFDGSSLDVGMDVSPSEPPWELLPIFPDLQVKSEPSSPCSSSSLSSESSRLSTEPSSEALGVGEVLHVKTESLAPPLCLLGDDPTSSFETVQINVIPTSDDSSDVQTKIEPVSPCSSVNSEASLLSADSSSQAFIGEEVLEVKTESLSPSGCLLWDVPAPSLGAVQISMGPSLDGSSGKALPTRKPPLQPKPVVLTTVPMPSRAVPPSTTVLLQSLVQPPPVSPVVLIQGAIRVQPEGPAPSLPRPERKSIVPAPMPGNSCPPEVDAKLLKRQQRMIKNRESACQSRRKKKEYLQGLEARLQAVLADNQQLRRENAALRRRLEALLAENSELKLGSGNRKVVCIMVFLLFIAFNFGPVSISEPPSAPISPRMNKGEPQPRRHLLGFSEQEPVQGVEPLQGSSQGPKEPQPSPTDQPSFSNLTAFPGGAKELLLRDLDQLFLSSDCRHFNRTESLRLADELSGWVQRHQRGRRKIPQRAQERQKSQPRKKSPPVKAVPIQPPGPPERDSVGQLQLYRHPDRSQPAFLDAIDRREDTFYVVSFRRDHLLLPAISHNKTSRPKMSLVMPAMAPNETLSGRGAPGDYEEMMQIECEVMDTRVIHIKTSTVPPSLRKQPSPTPGNATGGPLPVSAASQAHQASHQPLYLNHP

SEQ ID NO: 4329 - protein, 708 aa, Homo sapiens
LVGGWGGKMAELMLLSEIADPTRFFTDNLLSPEDWDSTLYSGLDEVAEEQTQLFRCPEQDVPFDGSSLDVGMDVSPSEPPWELLPIFPDLQVKSEPSSPCSSSSLSSESSRLSTEPSSEALGVGEVLHVKTESLAPPLCLLGDDPTSSFETVQINVIPTSDDSSDVQTKIEPVSPCSSVNSEASLLSADSSSQAFIGEEVLEVKTESLSPSGCLLWDVPAPSLGAVQISMGPSLDGSSGKALPTRKPPLQPKPVVLTTVPMPSRAVPPSTTVLLQSLVQPPPVSPVVLIQGAIRVQPEGPAPSLPRPERKSIVPAPMPGNSCPPEVDAKLLKRQQRMIKNRESACQSRRKKKEYLQGLEARLQAVLADNQQLRRENAALRRRLEALLAENSELKLGSGNRKVVCIMVFLLFIAFNFGPVSISEPPSAPISPRMNKGEPQPRRHLLGFSEQEPVQGVEPLQGSSQGPKEPQPSPTDQPSFSNLTAFPGGAKELLLRDLDQLFLSSDCRHFNRTESLRLADELSGWVQRHQRGRRKIPQRAQERQKSQPRKKSPPVKAVPIQPPGPPERDSVGQLQLYRHPDRSQPAFLDAIDRREDTFYVVSFRRDHLLLPAISHNKTSRPKMSLVMPAMAPNETLSGRGAPGDYEEMMQIECEVMDTRVIHIKTSTVPPSLRKQPSPTPGNATGGPLPVSAASQAHQASHQPLYLNHP

SEQ ID NO: 4330 - protein, 23 aa, Homo sapiens
LFFLLLLLFLLLLVVVVVVVLNF

SEQ ID NO: 4331 - protein, 26 aa, Homo sapiens
LLCMCIWMGTMWLESRWQSTEGGLYW

SEQ ID NO: 4332 - protein, 32 aa, Homo sapiens
LTSVKAVIFSIFQPYSHPKCGYASSIAPYSNI

SEQ ID NO: 4333 - protein, 28 aa, Homo sapiens
LMAAPHLQLLCSPLPKPYGLPCICIHPV

SEQ ID NO: 4334 - protein, 86 aa, Homo sapiens
LLMPAQNSQLPVSACPPEIKVLQWLSRSHQVISFHPHPKALAVTLLPALTQSLCLCMASCVYSGPKGFLFLFFPQTAQEKHMKNIT

SEQ ID NO: 4335 - protein, 66 aa, Homo sapiens
MNLNPRLRLQVISFHPHPKALAVTLLPALTQSLCLCMASCVYSGPKGFLFLFFPQTAQEKHMKNIT

SEQ ID NO: 4336 - protein, 145 aa, Homo sapiens
LTTTAFPFVSVMSWKKALRIPGDLRVATVTLMLAMLSSLLAEGRDSPVEPTVTISPSRTEALNHHNLLVCSVTDFYPGQIKVRWFRNDQEETAGVVSTPLIRNGDWTFQILVMLEMTPQRGDVYTCHVEHPSLQSPITVEWRLLH

SEQ ID NO: 4337 - protein, 235 aa, Homo sapiens
LTTTAFPFVSVMSWKKALRIPGDLRVATVTLMLAMLSSLLAEGRDSPEDFVFQFKGMCYFTNGTERVRLVTRYIYNREEYARFDSDVGVYRAVTPQGRPDAEYWNSQKEVLEGTRAELDTVCRHNYEVAFRGILQRRVEPTVTISPSRTEALNHHNLLVCSVTDFYPGQIKVRWFRNDQEETAGVVSTPLIRNGDWTFQILVMLEMTPQRGDVYTCHVEHPSLQSPITVEWRLLH

SEQ ID NO: 4338 - protein, 280 aa, Homo sapiens
LTTTAFPFVSVMSWKKALRIPGDLRVATVTLMLAMLSSLLAEGRDSPEDFVFQFKGMCYFTNGTERVRLVTRYIYNREEYARFDSDVGVYRAVTPQGRPDAEYWNSQKEVLEGTRAELDTVCRHNYEVAFRGILQRRVEPTVTISPSRTEALNHHNLLVCSVTDFYPGQIKVRWFRNDQEETAGVVSTPLIRNGDWTFQILVMLEMTPQRGDVYTCHVEHPSLQSPITVEWRAQSESAQSKMLSGVGGFVLGLIFLGLGLIIRQRSQKGPQGPPPAGLLH

SEQ ID NO: 4339 - protein, 294 aa, Homo sapiens
LPILPCPNSIPGVHQIHQVRAVLTTTAFPFVSVMSWKKALRIPGDLRVATVTLMLAMLSSLLAEGRDSPEDFVFQFKGMCYFTNGTERVRLVTRYIYNREEYARFDSDVGVYRAVTPQGRPDAEYWNSQKEVLEGTRAELDTVCRHNYEVAFRGILQRRVEPTVTISPSRTEALNHHNLLVCSVTDFYPGQIKVRWFRNDQEETAGVVSTPLIRNGDWTFQILVMLEMTPQRGDVYTCHVEHPSLQSPITVEWRAQSESAQSKMLSGVGGFVLGLIFLGLGLIIRQRSQKGLLH

SEQ ID NO: 4340 - protein, 68 aa, Homo sapiens
LILGGARTDSGALCSEIMHLPPICPSPFYVYIINPHCQGHCPETPLRPYSFQPQIIYFSVVQPYSYKS

SEQ ID NO: 4341 - protein, 297 aa, Homo sapiens
LTEFYELILKRLTILLSHFFPFSRMGSGWVPWVVALLVNLTRLDSSMTQGTDSPEDFVIQAKADCYFTNGTEKVQFVVRFIFNLEEYVRFDSDVGMFVALTKLGQPDAEQWNSRLDLLERSRQAVDGVCRHNYRLGAPFTVGRKVQPEVTVYPERTPLLHQHNLLHCSVTGFYPGDIKIKWFLNGQEERAGVMSTGPIRNGDWTFQTVVMLEMTPELGHVYTCLVDHSSLLSPVSVEWRAQSEYSWRKMLSGIAAFLLGLIFLLVGIVIQLRAQKGYVRTQMSGNEVSRAVLLPQSC

SEQ ID NO: 4342 - protein, 43 aa, Homo sapiens
LCVLLQVTKYLNRRGLRRDLNSSCPTNSISAFLLTSCENYSSG

SEQ ID NO: 4343 - protein, 198 aa, Homo sapiens
MIGSGLAGSGGAGGPSSTVTWCALFSNHVAATQASLLLSFVWMPALLPVASRLLLLPRVLLTMASGSPPTQPSPASDSGSGYVPGSVSAAFVTCPNEKVAKEIARAVVEKRLAACVNLIPQITSIYEWKGKIEEDSEVLMMIKTQSSLVPALTDFVRSVHPYEVAEVIALPVEQGNFPYLQWVRQVTESVSDSITVLP

SEQ ID NO: 4344 - protein, 56 aa, Homo sapiens
VPFPRTSADAVVDWSSLPWLLLHQEVGKPRHDRVGIGWLWRRRWSFFYCHMVRAVF

SEQ ID NO: 4345 - protein, 63 aa, Homo sapiens
LRKHRRGGIGSHCHHRHRLTCSSEDPGLTSACRTSSWPLGLGLPPPRPAERALPWLWRSTPGR

SEQ ID NO: 4346 - protein, 80 aa, Homo sapiens
MACVVLRLRTASVGLWVSDEVPRLQEVEGPTGEVGRAGVLIQGCLSPEPRFILPPWGGGWPQGRGEALQCGVEPHRGALG

SEQ ID NO: 4347 - protein, 636 aa, Homo sapiens
MWKSWKLRTDVRVREGAGGSPCASSQPGSRGPCFLPGLSSQEVSRRRQFLREHAAPFSAFLTDSFGRQHSYLRISLTEKCNLRCQYCMPEEGVPLTPKANLLTTEEILTLARLFVKEGIDKIRLTGGEPLIRPDVVDIVAQLQRLEGLRTIGVTTNGINLARLLPQLQKAGLSAINISLDTLVPAKFEFIVRRKGFHKVMEGIHKAIELGYNPVKVNCVVMRGLNEDELLDFAALTEGLPLDVRFIEYMPFDGNKWNFKKMVSYKEMLDTVRQQWPELEKVPEEESSTAKAFKIPGFQGQISFITSMSEHFCGTCNRLRITADGNLKVCLFGNSEVSLRDHLRAGASEQELLRIIGAAVGRKKRQHAGMFSISQMKNRPMILIELFLMFPNSPPANPSIFSWDPLHVQGLRPRMSFSSQVATLWKGCRVPQTPPLAQQRLGSGSFQRHYTSRADSDANSKCLSPGSWASAAPSGPQLTSEQLTHVDSEGRAAMVDVGRKPDTERVAVASAVVLLGPVAFKLVQQNQLKKGDALVVAQLAGVQAAKVTSQLIPLCHHVALSHIQVQLELDSTRHAVKIQASCRARGPTGVEMEALTSAAVAALTLYDMCKAVSRDIVLEEIKLISKTGGQRGDFHRA

SEQ ID NO: 4348 - protein, 410 aa, Homo sapiens
VGPSHQADFSTRGTIPASPTLQSPNMWKSWKLRTDVRVREGAGGSPCASSQPGSRGPCFLPGLSSQEVSRRRQFLREHAAPFSAFLTDSFGRQHSYLRISLTEKCNLRCQYCMPEEGVPLTPKANLLTTEEILTLARLFVKEGIDKIRLTGGEPLIRPDVVDIVAQLQRLEGLRTIGVTTNGINLARLLPQLQKAGLSAINISLDTLVPAKFEFIVRRKGFHKVMEGIHKAIELGYNPVKVNCVVMRGLNEDELLDFAALTEGLPLDVRFIEYMPFDGNKWNFKKMVSYKEMLDTVRQQWPELEKVPEEESSTAKAFKIPGFQGQISFITSMSEHFCGTCNRLRITADGNLKVCLFGNSEVSLRDHLRAGASEQELLRIIGAAVGRKKRQHAGMFSISQMKNRPMILIGG

SEQ ID NO: 4349 - protein, 28 aa, Homo sapiens
VVCMERFSLKSVCGLHLQDSTSTDSKKT

SEQ ID NO: 4350 - protein, 65 aa, Homo sapiens
LPGGGCEPGRRGEEEAEKDAKFSGELSASESEGSRNEENLQELPRTVTCLIPCSHPCSMNKVDTH

SEQ ID NO: 4351 - protein, 52 aa, Homo sapiens
LALNPASISVLIIAWMFRAAIQCEFSKQEFMDGMTELGCDSIEKLKAQIPKM

SEQ ID NO: 4352 - protein, 99 aa, Homo sapiens
VFGAVLAAMQDWQELRCSHLPRRPPFHIQQRRRGQPLRRFFTRLRPGHAQVHVHFSGYQVATYLKWCESYSFGTVVDFQIGKSKGPKRQLTGDHALGFS

SEQ ID NO: 4353 - protein, 46 aa, Homo sapiens
MQDWQELRCSHLPRRPPFHIQQRRRGQPLRRFFTRCILVVTRLPRI

SEQ ID NO: 4354 - protein, 51 aa, Homo sapiens
LYQELPPEIKERSPPLSPEEKTKIEKSPAPQKVNVFEHTYYICTLIFTLSG

SEQ ID NO: 4355 - protein, 64 aa, Homo sapiens
MVQFEIFETIRTDHFLATFYIGILEFLGEDMKVILRPCRWARKDVRPWFLFKSNQNSLASVGFI

SEQ ID NO: 4356 - protein, 12 aa, Homo sapiens
MLFLPFFTAHRM

SEQ ID NO: 4357 - protein, 19 aa, Homo sapiens
LAGFGGGRVTAATPERRLS

SEQ ID NO: 4358 - protein, 90 aa, Homo sapiens
LGQNPPQDFGSRALPPTGGEGKMWGLLPPAGLADVCFCFHAAQQCSRWSLWKHRLRQGLLCRSATTVMDRVIEAHTSPLSQEEPAKLGHL

SEQ ID NO: 4359 - protein, 173 aa, Homo sapiens
VTRVGPLLILEPSLGLRSGAPRWREAAGSLGGQAPSAVRSSRAACRAQFLKAGAACGPRACRDLLPEMRAYWPDVIHSFPNRSRFWKHEWEKHGTCAAQVDALNSQKKYFGRSLELYRELDLNRWVRPSPGCTSQWGSLLSPKPDSWIQGSGCRPHCPPAASACALFGYWDHS

SEQ ID NO: 4360 - protein, 418 aa, Homo sapiens
VRRMRELLCSEQGGPADALRSAALPPVPHRSFGWGFRSSPAHTPCGWGAWGRCNGRAWGQDRWEGRGWPASVPGGLTIGVEVTSGPAAHRAQGYHEGPALSSGVSECLGESRPGEDGGTGPALQECIVGTLPPPRPRREGRSLPQSGRCTHLGAPHPCPPERALPLSLGAWPGPPGGPSVSAPKDIRSVRPISLVRPVLPATLSHGIPWPVACRECFSGGVPTPWLICPRLAGDIRSTANLSRSQGRGTHLAFVSSPQALRTQAFQVLLQPLACVLKATVQAPGPPGLLDGTADDATTVDTLLASKSSCAGLLCRTLAHLEELQPLPQRPSPWPQASLLGATVTVLRLCDGSAAPASSVGGHLCGTLAGCVRVQRAALDFLGTLSQGTGPQELVTQALAVLLECLESPGSSPTVRWWG

SEQ ID NO: 4361 - protein, 495 aa, Homo sapiens
LYCTPLKKTLPLIYQYKKDPLRGGGHFCVMATSLLGEEPRLGSTPLAMLAATCNKIGSPSPSPSSLSDSSSSFGKGFHPWKRSSSSSSASCNVVGSSLSSFGVSGASRNGGSSSAAAAAAAAAAAAAALVSDSFSCGGSPGSSAFSLTSSGGSSAHSQDGSHQPVFISKVHTSVDGLQGIYPRVGMAHPYESWFKPSHPGLGAAGEVGSAGASSWWDVGAGWIDVQNPNSAAALPGSLHPAAGGLQTSLHSPLGGYNSDYSGLSHSAFSSGASSHLLSPAGQHLMDGFKPVLPGSYPDSAPSPLAGAGGSMLSAGPSAPLGGSPRSSARRYSGRATCDCPNCQEAERLGPAGASLRRKGLHSCHIPGCGKVYGKTSHLKAHLRWHTGERPFVCNWLFCGKRFTRSDELQRHLRTHTGEKRFACPVCNKRFMRSDHLSKHVKTHSGGGGGGGSAGSGSGGKKGSDTDSEHSAAGSPPCHSPELLQPPEPGHRNGLE

SEQ ID NO: 4362 - protein, 537 aa, Homo sapiens
LYCTPLKKTLPLIYQYKKDPLRGGGHFCVMATSLLGEEPRLGSTPLAMLAATCNKIGSPSPSPSSLSDSSSSFGKGFHPWKRSSSSSSASCNVVGSSLSSFGVSGASRNGGSSSAAAAAAAAAAAAAALVSDSFSCGGSPGSSAFSLTSSSAAAAAAAAAAAASSSPFANDYSVFQAPGVSGGSGGGGGGGGGGSSAHSQDGSHQPVFISKVHTSVDGLQGIYPRVGMAHPYESWFKPSHPGLGAAGEVGSAGASSWWDVGAGWIDVQNPNSAAALPGSLHPAAGGLQTSLHSPLGGYNSDYSGLSHSAFSSGASSHLLSPAGQHLMDGFKPVLPGSYPDSAPSPLAGAGGSMLSAGPSAPLGGSPRSSARRYSGRATCDCPNCQEAERLGPAGASLRRKGLHSCHIPGCGKVYGKTSHLKAHLRWHTGERPFVCNWLFCGKRFTRSDELQRHLRTHTGEKRFACPVCNKRFMRSDHLSKHVKTHSGGGGGGGSAGSGSGGKKGSDTDSEHSAAGSPPCHSPELLQPPEPGHRNGLE

SEQ ID NO: 4363 - protein, 58 aa, Homo sapiens
LIKIFSPWFESFFSLLLFVIVALRLSVTINFDRLSNQVGYVSCEVVRWFFLFWFGLVF

SEQ ID NO: 4364 - protein, 44 aa, Homo sapiens
LCWLPPKREQLSRMLAGGTTCWPETRLPGVGQPMLSGDIHLHLC

SEQ ID NO: 4365 - protein, 32 aa, Homo sapiens
LCWLPPKREQLSRMLAGGTTCWPETRLPGVDT

SEQ ID NO: 4366 - protein, 29 aa, Homo sapiens
LICFQCRVHLKDLTYHQSIEKHARKTRWA

SEQ ID NO: 4367 - protein, 30 aa, Homo sapiens
LPMSKPRYEEGWWGAGPLNREDQHPVLLTI

SEQ ID NO: 4368 - protein, 473 aa, Homo sapiens
LGKQRDSLGRWPWPQALPWCRCTPAPQLWLWQDGLGTWHPYSATICSFIEQQFVQQKGQRFGLGSLAHSIPLGQADPSLARYIIDLPSWTQFRQDTGTMRTVRRHLFPQHSAPGRGVVWEWLSDDGSWTAYEAGVCDDLEQQVARGNQLVDLAPLGYNYTVNYTTHTQTNKTSSFCCSVRRQAGPPYPVTTIIAPPGHTGVACSCHQCLSGSRTGPVSGRYRHSMTNLPAYPAPQHPPHRTASVFGTHQAFAPYNKPSLSGARSAPRLNTTNAWDAAPPSLGSQPLYRSSLSHLGPQHLPPGSSTSGAVSASLPSGPSSSPGSVPATVPMQMPKPSRVQQALAGATPKPEPEPEQVIKNYTEELKVPPDEDCIICMEKLSAASGYSDVTDSKAIGPLAVGCLTKCSHAFHLLCLLAMYCNGNKGPEHPNPGKPFTARGFPRQCYLPDNAQGRKPPGASRTRRHWLTFRPPHSC

SEQ ID NO: 4369 - protein, 487 aa, Homo sapiens
LWLWQDGLGTWHPYSATICSFIEQQFVQQKGQRFGLGSLAHSIPLGQADPSLARYIIDLPSWTQFRQDTGTMRTVRRHLFPQHSAPGRGVVWEWLSDDGSWTAYEAGVCDDLEQQVARGNQLVDLAPLGYNYTVNYTTHTQTNKTSSFCCSVRRQAGPPYPVTTIIAPPGHTGVACSCHQCLSGSRTGPVSGRYRHSMTNLPAYPAPQHPPHRTASVFGTHQAFAPYNKPSLSGARSAPRLNTTNAWDAAPPSLGSQPLYRSSLSHLGPQHLPPGSSTSGAVSASLPSGPSSSPGSVPATVPMQMPKPSRVQQALAGMTSVLMSAIGLPVCLSRAPQPTSPPASRLASKSHGSVKRLRKMSVKGATPKPEPEPEQVIKNYTEELKVPPDEDCIICMEKLSAASGYSDVTDSKAIGPLAVGCLTKCSHAFHLLCLLAMYCNGNKDGSLQCPSCKTIYERRRGPSPRERWRYYGSRCRSPATRTAGPSS

SEQ ID NO: 4370 - protein, 45 aa, Homo sapiens
LILRRTPLVAYGSPSASPTELWRIAIWRPSSCCLLDRLCFSKETA

SEQ ID NO: 4371 - protein, 23 aa, Homo sapiens
LRFKVLLRVLFFMAPVPPQVFGQ

SEQ ID NO: 4372 - protein, 127 aa, Homo sapiens
LADVSAVDSVFLGVILAPAKVVSRGGNPWAAVLYSWGLVQVSLLLQGALSLTPPAGRMGVQLDAGWETNVKTNAYALGVALALCRVHWHFVGFTSTLQVAPVLCRVHWHPGRFTGTFWGTRALCRVH

SEQ ID NO: 4373 - protein, 37 aa, Homo sapiens
LHSELANVPSTLDLNGDSHSLTGLQVSWLHPQTFILL

SEQ ID NO: 4374 - protein, 14 aa, Homo sapiens
LILLRSLPTPYSQP

SEQ ID NO: 4375 - protein, 137 aa, Homo sapiens
MPSGEGKQSVLIPTPVAGVCKPPLSSAGGSLDVCAHQGDLPAPELCPQVHLCLPKSARRDHFPCNAPQPNTRRVWHLGRNSWGGAVERVEVSGKTPTAAAPTVRAPAAQARASRSALEAAARTFPGAVSCQPAITQS

SEQ ID NO: 4376 - protein, 48 aa, Homo sapiens
LQGPTSGFPGSGFGPRRRGRKARAPAFPGLSLLGCLWSGQPGSREIQP

SEQ ID NO: 4377 - protein, 24 aa, Homo sapiens
MYSCRSGENEDIFLQTSYRSYMNV

SEQ ID NO: 4378 - protein, 133 aa, Homo sapiens
LVIWYCRETPSQPALQRGIASHSGCRERHLVTQAAETTAVNCSSSHCWMLADAVLAPAGDPFTKTFWADLKWLGFRSSASRTHPSSLERRGQRRGGGAACEIPPFTHTTTKRGHTEVKSDRVPGKAVRLETPE

SEQ ID NO: 4379 - protein, 139 aa, Homo sapiens
LVASPRLCWETRRWRLLRPERRARERGSRRVARSRFRVWSARELPSHQPVEETTGRASGERAHTVSSPAPASSIFPGLAWRVLADVFERRNVIGALSSPSPRQLLWGWRGIVRGALSCWEAWVLFPTTLKEDSVPNVPV

SEQ ID NO: 4380 - protein, 87 aa, Homo sapiens
LGLSSPLLRMAQALLGSGHRLLGEGSPLAITGMESMLERAQCWAGFASRTLRSSHPGLARRNQHLFPVAPVFRMWYWLWPSLLPCYP

SEQ ID NO: 4381 - protein, 69 aa, Homo sapiens
VGATCLRLPPLPAMYLPCLAVGHVGLPGGRPRGVTFPCHFARRPLPTPTPGCTAQAAAGQRGLWAMDTG

SEQ ID NO: 4382 - protein, 48 aa, Homo sapiens
LEGRAASQTSTNNGMRLDIWNHNHNRPERPTSLMTSFFFQRKVSVWGT

SEQ ID NO: 4383 - protein, 43 aa, Homo sapiens
LEGRAASQTSTNNGMRLDIWNHNHNRPERPTSLMTSFFFQRKF

SEQ ID NO: 4384 - protein, 541 aa, Homo sapiens
LPDDGSVSRTVITSPRSGCEGAGQRPGREPPAVGPIDDFPGRQEQPREPGRAPVPGGRTARRVRAALPAGNGRRPRAARAPQRGRSLSPSRDKLFPNPIRALGPNSPAPRAVRVERSVSGEMSERKEGRGKGKGKKKERGSGKKPESAAGSQSPALPPRLKEMKSQESAAGSKLVLRCETSSEYSSLRFKWFKNGNELNRKNKPQNIKIQKKPGKSELRINKASLADSGEYMCKVISKLGNDSASANITIVESNEIITGMPASTEGAYVSSESPIRISVSTEGANTSSSTSTSTTGTSHLVKCAEKEKTFCVNGGECFMVKDLSNPSRYLCKCPNEFTGDRCQNYVMASFYKAEELYQKRVLTITGICIALLVVGIMCVVAYCKTKKQRKKLHDRLRQSLRSERNNMMNIANGPHHPNPPPENVQLVNQYVSKNVISSEHIVEREAETSFSTSHYTSTAHHSTTVTQTPSHSWSNGHTESILSESHSVIVMSSVENSRHSSPTGGPRGRLNGTGGPRECNSFLRHARETPDSYRDSPHSER

SEQ ID NO: 4385 - protein, 758 aa, Homo sapiens
LPDDGSVSRTVITSPRSGCEGAGQRPGREPPAVGPIDDFPGRQEQPREPGRAPVPGGRTARRVRAALPAGNGRRPRAARAPQRGRSLSPSRDKLFPNPIRALGPNSPAPRAVRVERSVSGEMSERKEGRGKGKGKKKERGSGKKPESAAGSQSPALPPRLKEMKSQESAAGSKLVLRCETSSEYSSLRFKWFKNGNELNRKNKPQNIKIQKKPGKSELRINKASLADSGEYMCKVISKLGNDSASANITIVESNEIITGMPASTEGAYVSSESPIRISVSTEGANTSSSTSTSTTGTSHLVKCAEKEKTFCVNGGECFMVKDLSNPSRYLCKCPNEFTGDRCQNYVMASFYKAEELYQKRVLTITGICIALLVVGIMCVVAYCKTKKQRKKLHDRLRQSLRSERNNMMNIANGPHHPNPPPENVQLVNQYVSKNVISSEHIVEREAETSFSTSHYTSTAHHSTTVTQTPSHSWSNGHTESILSESHSVIVMSSVENSRHSSPTGGPRGRLNGTGGPRECNSFLRHARETPDSYRDSPHSERYVSAMTTPARMSPVDFHTPSSPKSPPSEMSPPVSSMTVSMPSMAVSPFMEEERPLLLVTPPRLREKKFDHHPQQFSSFHHNPAHDSNSLPASPLRIVEDEEYETTQEYEPAQEPVKKLANSRRAKRTKPNGHIANRLEVDSNTSSQSSNSESETEDERVGEDTPFLGIQNPLAASLEATPAFRLADSRTNPAGRFSTQEEIQARLSSVIANQDPIAV

SEQ ID NO: 4386 - protein, 55 aa, Homo sapiens
LKLGGGGCSEPRLRHCTPAWATEKTKRKTNDEGLQKLKPRHVSAPSMWAWFCQCF

SEQ ID NO: 4387 - protein, 368 aa, Homo sapiens
MTPCWRCLTCRCGLRASRLLWSLLRTPLWSVARLRTLMPQVTSGSWRGHSQRNRGAPSWALWNLWRTTQWIQMPQMALSICLNRRKVRGHQRGQARITHSPTVSQVTERSQDRLQDWDADGSIVSYLQDAAQGSWQEEVTQGPHSFQGTSTMTEGLEPGGSQEYEKVLVSVSEHTWTEQPEAESSQADRDRRQQGQEEQVQEAKNTFTQVVQGNEFQNIPGEQVTEEQFTDEQGNIVTKKIIRKVVRQIDLSSADAAQEHEEVTVEGPLEDPSELEVDIDYFMKHSKVLRRPRPWGTQRHHCCLALPGRLHDTSLHSPLYELSLQSLFSLVGSVSATSVWPPFDLLPVFCPSLRSVLLSVSAAVCRWS

SEQ ID NO: 4388 - protein, 217 aa, Homo sapiens
MSSKVSCDTLYKAVREVLHGNQCKRHKFLETMELHISLKNYDPQKDKRFSGTVRLKSTPHPKFSVCVLGDQQHCDEAKAIDIPHMDIKTLKNLNKNKKLVKKLVKKYDAFLASESLIKQIPRILSPGLNKAGKFPSLLTQNENMVAKVDEVKSTIKFQMKKVLCLAVAVGHVKMTDDELVYNTHLAVNFLGSLLKKNWQNVRALYIKSTMGKPQRLY

SEQ ID NO: 4389 - protein, 127 aa, Homo sapiens
VSRSRGLVQLGRPQPLVTRVMLFLALGSPWAVELPLCGRRTALCAAAALRGPRASVSRASSSSGPSGPVAGWSTGPSGAARLLRRPGRAQIPVYWEGYVRFLNTPSDKSEDGRLIYTGNMARAVFGK

SEQ ID NO: 4390 - protein, 131 aa, Homo sapiens
VSRSRGLVQLGRPQPLVTRVMLFLALGSPWAVELPLCGRRTALCAAAALRGPRASVSRASSSSGPSGPVAGWSTGPSGAARLLRRPGRAQIPVYWEGYVRFLNTPSDKSEDGRLIYTGNMARAVFGWSAVA

SEQ ID NO: 4391 - protein, 280 aa, Homo sapiens
VSRSRGLVQLGRPQPLVTRVMLFLALGSPWAVELPLCGRRTALCAAAALRGPRASVSRASSSSGPSGPVAGWSTGPSGAARLLRRPGRAQIPVYWEGYVRFLNTPSDKSEDGRLIYTGNMARAVFGVKCFSYSTSLIGLTFLPYIFTQNNAISESVPLPIQIIFYGIMGSFTVITPVLLHFITKGYVIRLYHEATTDTYKAITYNAMLAETSTVFHQNDVKIPDAKHVFTTFYAKTKSLLVNPVLFPNREDYIHLMGYDKEEFILYMEETSEEKRHKDDK

SEQ ID NO: 4392 - protein, 56 aa, Homo sapiens
LFLSPVAFFSPALPGARHHRPTPHAPPPWGILSAPALKALTLELSAHPPTAPAQAS

SEQ ID NO: 4393 - protein, 125 aa, Homo sapiens
VTTKAVLLALLMAGLALQPGTALLCYSCKAQVSNEDCLQVENCTQLGEQCWTARIRAVGLLTVISKGCSLNCVDDSQDYYVGKKNITCCDTDLCNASGAHALQPAAAILALLPALGLLLWGPGQL

SEQ ID NO: 4394 - protein, 131 aa, Homo sapiens
LQPTLGVVPQASVPLLTHPAQWEPVLVPEAHPNASLTMYVCAPVPHPDPPMALSRTPTRQIGSIDTDPPADGPSNPLCCCFHGPAFSTLNPVLRHLFPQEAFPAHPIYDLSQVWSVVSPAPSRGQALRRAR

SEQ ID NO: 4395 - protein, 108 aa, Homo sapiens
LRLAAEPKSPGGGPAPGTRPAPAPHGPVPGPSPEPISMPQGEGQGHLSQKKTVTIPSGSTLAFRVAQLVIDSDLGELELGVSRAQALAEKQGGLGRATRQLGLPWAPG

SEQ ID NO: 4396 - protein, 35 aa, Homo sapiens
LRPPRSACGPARLPPRRGGRFQRLKVSSSQVVPKV

SEQ ID NO: 4397 - protein, 52 aa, Homo sapiens
LLPTRRRLGASSHPHPFPAKVADGSQALEGALPRNSVCERVVPGPRRHFPSA

SEQ ID NO: 4398 - protein, 259 aa, Homo sapiens
VDVNWSIASPILEDELASTQSKLTLTQKRWLPDHTYTCQVTYQGNTFEDSAKKCADSNPQGVSTYLSRSSPFYLFIRKLPTITCLVVDLAPSKENVKLTWSQASGKSVAQVILRQEKQCNGTFTITSTLLVGTRDWIKGETYQCRVTHTHLQSTTKISGPCAPPQVYVFATLEEPRNQDKRTLTCLIQNFWPKDILVQWLYNEVQLPDTWHSMTQPRKTKGSGVLVFSCLEVTRAEWEQKNEFICSVVHETATGSQTVK

SEQ ID NO: 4399 - protein, 84 aa, Homo sapiens
LNKQEVHPNPLIINEVEYLCAIGSCVSLIRCSCPFALLLSVGVALFFVSSYRISLYNKCNLTCICLHLFLPSICCSFTKATLFS

SEQ ID NO: 4400 - protein, 57 aa, Homo sapiens
MTFFVVVRVWYVPLRPTPIAAIYSTDLSSIPLAVLDVKMIFPAGIPSTKLKTLGMWK

SEQ ID NO: 4401 - protein, 45 aa, Homo sapiens
LATRYMLSVLKELKNTHQRRIFLEREGSSITVRCAGILSRVSTAF

SEQ ID NO: 4402 - protein, 81 aa, Homo sapiens
VCWNPFPSQYCFLEENRGDLFGMYLTPKKPSEVTVSYRQQVEHCGMHELLRPLQLSATWRLGPESRFMLCSTLVSCFCKSD

SEQ ID NO: 4403 - protein, 52 aa, Homo sapiens
LGGKATTASEAKAVLSAKQLSDEEVHAGVGEPLRSLSNSTARNVTWKLCSRL

SEQ ID NO: 4404 - protein, 128 aa, Homo sapiens
VARTSASPSPHTPERSPLPWGGQEGRRGVAAGKLPTLGARCGGEGVGAAGQLRRAARRRQRLKCPGASPESRDGPEPGGKAPRTNTAPCTIRAKMTAAKLLRNTTGKRGSLRSIYPPPPRGCGVPRRM

SEQ ID NO: 4405 - protein, 116 aa, Homo sapiens
MAEVLRTLAGKPKCHALRPMILFLIMLVLVLFGYGVLSPRSLMPGSLERGFCMAVREPDHLQRLVAKDGLPPAKVLTPCRKDVLVVPLGWLPLSGRAHSTSTSSTSSSGSRTPPLG

SEQ ID NO: 4406 - protein, 56 aa, Homo sapiens
VTEEAVHSHVTMKESQRAFCTMHFYYYFPILSTISLRNLEYNQDPPLHATVAAFHE

SEQ ID NO: 4407 - protein, 58 aa, Homo sapiens
LCNAVGCVLWSCPRSPGRGHAVGQGLEGGGGCPWATPPSLGGADFCNTKYSLWQKKCL

SEQ ID NO: 4408 - protein, 118 aa, Homo sapiens
LDGAGAMGKRVRWGPLVPVPRKPARWNWHLSGPDRAGGCTGSERNRSVQAPVLDGQLGPGILTLHPGSERENCGVCSAKPGQLSRQPPPPSRSPSLPQRTPGHGPSCSRHSSHRLNLC

SEQ ID NO: 4409 - protein, 213 aa, Homo sapiens
VGAAPEVGIPPPNRRATCGGLRGCGSSRRWARPPPEAAAGSRAAAGSAPPVPPSPPYPSSPARPPFPTPGPAEAARVSRVSPPAARWGRGRGRGRRCDPQRWKRELQLGRARGWGVPANPALPEGPSLAGSGAFLSGARPPCSAQLGVRSREEPPHPPSRPAGPSRQVVAGEVGAGRPLSVSPLATTRRDLGDSVDPTTGDHETQAVSPRPAA

SEQ ID NO: 4410 - protein, 134 aa, Homo sapiens
MPGDRHALPLIIPPFWHLTSRERRSRAGKRTKNILREPEATEDLCGVTGRQKQAGRGGRNHIYSVLTTATPLPSTMPDTSWEAKNYLLKEQINEGIKCNPLRAWPFRLLLEVNLSMSHIHRNIHLIPRDHQKTS

SEQ ID NO: 4411 - protein, 107 aa, Homo sapiens
LIPHRLQPANKVNNQCCSCSPAHPAPLALCGRNHIYSVLTTATPLPSTMPDTSWEAKNYLLKEQINEGIKCNPLRAWPFRLLLEVNLSMSHIHRNIHLIPRDHQKTS

SEQ ID NO: 4412 - protein, 103 aa, Homo sapiens
VNPRGGSLRGHVGETRQIRWREQDAGWRGPPTPAPAALQRTQTHCWKEPPARPMAPILHTQMLRPSVSKWLHQGHSASRWPRRDSKFHHVTPGPSCSHACSQP

SEQ ID NO: 4413 - protein, 107 aa, Homo sapiens
VDRQTGLERLECKETCSLVGTMRTPAAKGGSEESLNSLRTYCRLPFGKCSWSCALGGVPGRAVWPGNGGEAPALSSCILTYNWESPVFLLPQPSVPCFEPGKMAHHP

SEQ ID NO: 4414 - protein, 53 aa, Homo sapiens
VDRQTGLERLQPWLPSGRLDHECFKGKAMSDSIPHPQHVKQRLAEQRTHPSIE

SEQ ID NO: 4415 - protein, 53 aa, Homo sapiens
LGGEKRGPRGVGPIGYRRLGSKEEKVWSVACLRGAKWFLTGVRRAWWGARLVR

SEQ ID NO: 4416 - protein, 78 aa, Homo sapiens
MILSGHIPEAGGKKNSISEANECQSLEDGNLNRKSTVTYYCPSEKKEEVHVTDGKSVNQRQSEVYSMNDLFFWYNPVH

SEQ ID NO: 4417 - protein, 82 aa, Homo sapiens
MLSTAQNISDRKSCASPSFPSKTSMHAIARIPRHRTEPGLPATKAAMGSYSFSSSSVAPFSPQGRLSPGEEPGWLRCGSRGP

SEQ ID NO: 4418 - protein, 122 aa, Homo sapiens
LERRLFYSETPLQLFFFFGNCLFCFPFNIRSFLLYKSSFCSKSGCKQRCYHKDRKQRPHWCSAGLQALPGFIVGEATRPAPSQRDVTHAAGCHPQNSRETLGAPGQEEADVNFNSGDFKRNF

SEQ ID NO: 4419 - protein, 89 aa, Homo sapiens
LALHQRPLGFSGGDRGALGAGRLLQEAKRRPQGWPGTAWNQLEDVSRTEERATTSVRKGGKRAERGERPRWEAEAGSQRAGGWETMARA

SEQ ID NO: 4420 - protein, 30 aa, Homo sapiens
LHPCSQVAHPTVFLSLVPPTEDPPHRKKTV

SEQ ID NO: 4421 - protein, 110 aa, Homo sapiens
LSDPPNVHHLCPFVKHRDCFRLRPHSRHCSCGHPWKCVLRFLQGPDMQGSSRMLKEQRNQRTRQTNPVCWYRVIYLGDLTDKLGLGQPRDKQISVPVILEPRLMYHRERV

SEQ ID NO: 4422 - protein, 68 aa, Homo sapiens
LTEQETCLFPGVITIYLSVYCSTMSDIQSKIKTHKKRQETNNPLSRDKVINKSRCRHDPYVGTIIRGL

SEQ ID NO: 4423 - protein, 108 aa, Homo sapiens
LTPASKCVCVCVCVCVCVCALAVIYDLQWPVCGFGFHCGVENVVCLPSAYVCLGLCVHPSSPALVLRQTKEEGLRTFLASKAPLQACCPTHPAIPRPACIVVCTFICS

SEQ ID NO: 4424 - protein, 52 aa, Homo sapiens
LRAQKAAEASLGPLLSCPWALPWLLSFPTAQPKESPLQLTRVQPPEQRVPQP

SEQ ID NO: 4425 - protein, 83 aa, Homo sapiens
MILSLVAPEKHQHLMASPSRLQSQRAILCGKRRAGSWRTSGAPGMDQCLHQKRKPVSNGGAGGFLEGGGLIQDHQGTADCSRS

SEQ ID NO: 4426 - protein, 77 aa, Homo sapiens
LVFQTAPQMASPSRLQSQRAILCGKRRAGSWRTSGAPGMDQCLHQKRKPVSNGGAGGFLEGGGLIQDHQGTADCSRS

SEQ ID NO: 4427 - protein, 43 aa, Homo sapiens
LMHTVEADLTLSPLYNQNVSLEATSHHPLAIGTWASHLFCSPL

SEQ ID NO: 4428 - protein, 36 aa, Homo sapiens
VDMCTKVYVQRGSEITFARAKTLRPMRVFINRRMVK

SEQ ID NO: 4429 - protein, 63 aa, Homo sapiens
LMLCPGPLSSRSCPLLVLPPTSPCSPEAPEAALPWSPELQGLPPAHPASHLPLFTFSCSALVC

SEQ ID NO: 4430 - protein, 37 aa, Homo sapiens
VEGGVEARYEPVGASPTPQSQRQTVLGRTDARAEIHF

SEQ ID NO: 4431 - protein, 122 aa, Homo sapiens
VWTVTCGPVMHAPVTCGPVTCEPVVWSCRLWACHVWTCHVWTRLKAGCLSQSYAWAGRGMPLHFLSPMALQCCWVAVTDPGQPLLPGRQLELQGRVSRPAQEASSLLPGTCRSYVQPRSLSV

SEQ ID NO: 4432 - protein, 56 aa, Homo sapiens
VPSPYPHKGTNKPDHRSPCETTFPADTEKKEGIAAQGGPAPPGEPGNSRRETRWPH

SEQ ID NO: 4433 - protein, 86 aa, Homo sapiens
VVLTPAPNHSRFSSESQWQRHIACLDPTGSCRGRKPSTGAGLFSNLHFSLLVSQNSGTRWSVLNHPHWVALRTLGLGLQMLCPISA

SEQ ID NO: 4434 - protein, 14 aa, Homo sapiens
MTGMNHRASETPRL

SEQ ID NO: 4435 - protein, 124 aa, Homo sapiens
LPAKSPTPTTHTPQSEACDCPTSKLLFKEQTKQAGLSLGSPLVALAASGSQLSPTYRSTEHLSPTRELGEGRMTQELHSERLRSTFLLALATLVIHVPTATAAAHLSTPQPYSGVQERVQMGPI

SEQ ID NO: 4436 - protein, 224 aa, Homo sapiens
LCHLALRQTLRGAPHPLPQGLTLLPACRDPLLAHGSRQGLGSHLRVSRRFSKVCGDWRASSLPQLELPILCAPSPQLAPPPRFQLTFFSSTQTPSTLICLPISIPGPSLSLSGSWSTPLDLSPKMAPWTLHTGPAVAQDPGQLRGLQPGSLCVWGFAKFSHLLSTGGTGWGAGSPAPPVWSLLTAEEGKGEDEPFKFNDMATAAPAGAAIWRGRVSHLQWRAGA

SEQ ID NO: 4437 - protein, 93 aa, Homo sapiens
VERDSSRLTSCLLRTSRAGPESGPGTERQIGTTEQIYQGMLANLVFYYDQGRMAPERSLLCDWSSYIASMFDSSSRNVSIANSMSLRSQNLSQ

SEQ ID NO: 4438 - protein, 80 aa, Homo sapiens
VAPSEAHCSLDILGSGDPLTSAYRAAGTTDACYHAQLIFVETGFCHVAQRGLELLDSSDLPTSASQSAEITGMSHLAYPC

SEQ ID NO: 4439 - protein, 49 aa, Homo sapiens
MGCLLPESNSCYYCKYHCHEYPQQDPLPDLHEQLCEIPTASCWASDMRG

SEQ ID NO: 4440 - protein, 42 aa, Homo sapiens
LLPESNSCYYCKYHCHEYPQQDPLPDLHEQPTASCWASDMRG

SEQ ID NO: 4441 - protein, 41 aa, Homo sapiens
LNLTPATTANTTAMNILSKTPFQTCMNSCVKYRLLHAGLQT

SEQ ID NO: 4442 - protein, 74 aa, Homo sapiens
LSKEAEMHGERIRVGMRKQRVVRSVRAKRQETCGTWGQLGPELALEEHPLPAGARRGPFPWVKFPILLKGQLKK

SEQ ID NO: 4443 - protein, 299 aa, Homo sapiens
VTPSSVQTAGTHSGQDPVPGLALRTASRRNCQAAGTRGSCSSWEDAGPSILLCSTMRCGVSSVPGEIPASFPSETLGRGHVQSQCPDPRPTVPGDLQREPLLKRRRLRHLLCLPLVTTKTDAPSPQDSSAALQRMFAEHLLSARHCARCRGSCNKQNSCFYGAHIHRMVREDPAEKPPFEPRLEELRLRARMTSRVEPSRQKNNRVKVFRHVQAPPLPGQAHVTYEDNGTSQRQSNTSPCKNCQCNRPLPYLSSHLTNIDGPPLNTGCCAGVWDTAPDTQEMGRAFLSLRLRRSSNLLP

SEQ ID NO: 4444 - protein, 164 aa, Homo sapiens
LQREPLLKRRRLRHLLCLPLVTTKTDAPSPQDSSAALQRMFAEHLLSARHCARCRGSCNKQNSCFYGAHIHRMVREDPAEKPPFEPRLEELRLRARMTSRVEPSRQKNSEYKASNRCAGMFPENRGGSHSCGRVRRGAAGGEAREALEAEAAGLMVIMKLRVLL

SEQ ID NO: 4445 - protein, 157 aa, Homo sapiens
LPLLKSRKGLVCLEGCATWQEENKHLGNSGCAVHLLCGLRQATDFSELRIYKLRISNRRISVKYFKNRRCLSDSLHLKGTKRMQRIPCHRNHCLQCHAWQFLFVRISPCFRVSDKSAFKMSAYAGISCKDSTWEEAVSRLRRLLGGFSSLRAVRLRT

SEQ ID NO: 4446 - protein, 75 aa, Homo sapiens
LLRMDRTPQLRCFCQKHELESDPPSSSAYQFTPRTTGWGRNQQNLNCGSLCRMHNQSRSFKKKLKEKKIYELKET

SEQ ID NO: 4447 - protein, 18 aa, Homo sapiens
LHNGFSVEPEGTGWKQQE

SEQ ID NO: 4448 - protein, 67 aa, Homo sapiens
LAGGLESKQYPRPHGCLRALGPTCGFSGVSQAEHHRTQTRHSHAELTRLQVCWNLEHSSPPAQPPHS

SEQ ID NO: 4449 - protein, 38 aa, Homo sapiens
LLLGPTPHSPALDDVTNDSSLWHLSAGSAEASLAIAGK

SEQ ID NO: 4450 - protein, 41 aa, Homo sapiens
LRGENHLCAGHLSRLVRCSPRAQFLVSDEVTGAVIGYVHTH

SEQ ID NO: 4451 - protein, 64 aa, Homo sapiens
LLELRRGKNKHPARAGGTGEGSHGSAWPPEGSRDGLTVGFKDVPQVDSLTDSSSNAAVTCDPHS

SEQ ID NO: 4452 - protein, 36 aa, Homo sapiens
LGSNNTDAQSLTKKSQSLKGHGLGTMLTKLPIFPTP

SEQ ID NO: 4453 - protein, 26 aa, Homo sapiens
VMNTLTRGLDLHCSHLSRDWNPADCE

SEQ ID NO: 4454 - protein, 113 aa, Homo sapiens [sequence omitted]

SEQ ID NO: 4455 - protein, 40 aa, Homo sapiens
MPLRASSSQEGAQRSSSTSSILDFRLFVKGWDSARKATQI

SEQ ID NO: 4456 - protein, 37 aa, Homo sapiens
LNFGVYEDVKWCILQCSLYMLIHLGMGSHSVLFYPIK

SEQ ID NO: 4457 - protein, 176 aa, Homo sapiens
VLPLTLGTPQPQHPRPHNYWGWGQEGEVLPEGLLRGYSFLHRYSRALSGSGHLSPFWALEEPRPSPVLRPCSPLPSAPTPPACSAGAHPLGQPAEPPPPPESASGPLLLLLEEQHPGPRPAVFSVAARLGKSPTPASAPRYPLPPLPGSGDNHLPTHPGHASLTFPPRLASSLLPS

SEQ ID NO: 4458 - protein, 224 aa, Homo sapiens
VPCVHMCCWWTSNYYCVLMRSALCFAASNVLVVTCQCLSNLSADHGREPWERGGLAMPPPLLILHPAATSSCRAPPVSVPVFLYFFLSRSVSASLSLSLSIFLSLHWSVSASASLFLCVCFLSQALAWLMAIISTPTHPSQLTTRFPCETLCLPRSRHQDRMRDAQILLGKTPAGENGHQSLNKSSRNDLPGGARPVAGTLDRIGCSAPRGSQHHLSRSALPQV

SEQ ID NO: 4459 - protein, 229 aa, Homo sapiens
VPCVHMCCWWTSNYYCVLMRSALCFAASNVLVVTCQCLSNLSADHGREPWERGGLAMPPPLLILHPAATSSCRAPPVSVPVFLYFFLSRSVSASLSLSLSIFLSLHWSVSASASLFLCVCFLSQALAWLMAIISTPTHPSQLTTRFPCETLCLPRSRHQDRMRDAQILLGKTPAGENVAARPRTGRDGGLGDTRVSLFLSLSLCISLSLSLSFSAFLSPGLSLVLSVSL

SEQ ID NO: 4460 - protein, 54 aa, Homo sapiens
MTGLVPSGRGRDSRTFSLCHLRTRPEGSPAWTLKLDFQPPELVSISRLIEAGRG

SEQ ID NO: 4461 - protein, 87 aa, Homo sapiens [sequence omitted]

SEQ ID NO: 4462 - protein, 56 aa, Homo sapiens
VKSANKVQPESFTAPDDISPADLPQLHGLMFEFDSVFKPGSNSTSLDSLLCSSEWS

SEQ ID NO: 4463 - protein, 63 aa, Homo sapiens [sequence omitted]

SEQ ID NO: 4464 - protein, 37 aa, Homo sapiens
LDWKTALPNGKNLSSLAVDPRRMRDTYSRDAHQLANP

SEQ ID NO: 4465 - protein, 112 aa, Homo sapiens
LPVRLPGAPDLPQDPFALLQPLRPLQLLRRREDVDVEGPVRLCGQLGARQRVVGAQPSHRVLLVLVVVLGLQGAAAGVPALSRAPGPRAGRPRDADDEQAEDQINGVLERLN

SEQ ID NO: 4466 - protein, 126 aa, Homo sapiens
LSPPRGQLAPLPLPELRHGSPGGPAWPLPALGCTSALSPVPGSGLGQPPPPLPRTSGLLPSSQAPTLLAAWPSGRHAPALGHLCPRPGLGASGAGPLRAPGSIAAPGGASICVGEPDLQGPGKGIL

SEQ ID NO: 4467 - protein, 89 aa, Homo sapiens
VGGSIVTSLPPGPGRGSGSVGRGGRTEVAAVGGGGVEGRGAQARTNPHVPGRDPDPAAYREAKPAGWAAEPESGTVWSPLELRSGCSAS

SEQ ID NO: 4468 - protein, 63 aa, Homo sapiens
MSYLPTNPPGSILTCWLGVSLGSHRSARGGSTIYGRLLPRRKDVWFSQAKDVPKYRGLLYLQS

SEQ ID NO: 4469 - protein, 43 aa, Homo sapiens
LFKEIQALLSLPRLFEESHRRCWRLQRHSRCPCCCYRGSQPRQ

SEQ ID NO: 4470 - protein, 35 aa, Homo sapiens
VVLAVDRLLFCDAHQRWCRRLWPSPGVPRLLPGGV

SEQ ID NO: 4471 - protein, 132 aa, Homo sapiens
LWPPLRAGGRTAPTPGVQPGAHLRHLLRVLRRLAKDLLAVGEVLVEAVEGVDVRAVQHLLWAAQHLLHEGGVHWAALDQAQAAGRRATSGRGRTPARPQSQPQPQSQPQPRPGPRPRAAPLRWEVRRKGRWG

SEQ ID NO: 4472 - protein, 282 aa, Homo sapiens
LGREGRAQPRSPRDSHAQAPRLEAGTPYFPVMGRPLEGQPLRALDLYPEPAFLRSGKDPKSSPASSPSFAVLGPEVRSTGGQAGSRRRPSAPCSQDRAAAEGAPALLGGSPSSGSPGHPPGSAFGVEAGCRALNVSEHARGGFALGLPFGLSGGAYLFLLLDGAGDPKPTPEAPISSADGRAWFPSESSWQLPQLPAGSTSGSEPRARPGLGPRQLLTGPRDGAAGQGPGRGLTARLGREREIDCGPRQAGHGGTATDTGRAGSGARHRPPRDRGTPGLRTH

SEQ ID NO: 4473 - protein, 102 aa, Homo sapiens
LPGPRVAAPLPGFIPWCHQPSCGPLSNVLGKEINIFKLDVSTVLLFCLESGTRGASACAAGAAGNSGCFSLSLSFLGAHFCCFDSRAYQVRSEGGRRQCPFC

SEQ ID NO: 4474 - protein, 248 aa, Homo sapiens
LARSPRMALARGAALAGSRREARGREPAARPPACTGCVRGLGTHIPPTTAAPTSLPGQAPGHSLPAFLLPPPSSLHSPPASDPQTESGAESSSGAHLPAIKSCSLACPPAPWSPAFHTALLLPAWLAACRPLRVLHRLSSLGSGPVDLSLRPSSGPGLALGHGPFPLQPWGPAPRARILSSLEVPKEGVSQDLPTLEGVQAQGELDIPPVHAPRAETGIQGGPPSRGVRPGSSWAISVGRDRLAAATS

SEQ ID NO: 4475 - protein, 348 aa, Homo sapiens
MAMRQTLLTYFGHTWPMVDLAFSGITTYGYFLTSAYKDGKPMLRQGDTGDWIGTFWGHKGAVWGATLNATKAATAAADFTAKVWDAVLGDELMTLAHKYIVKTVYFMQDSNYLLTKGQDKLLRMYDLNKPKARPKEISGHTSGIKKRLLWCSEDKQILSADDKTARLWDHATMTEVKSLNFNMSVSSTKYIPEGEILVITYGLSIAFHSAVSLDPITSFEAPATINSASLHPEKEFLVAGGEDFKLYKYFNHGEEFESYKGYFGPIHCVRFSRDGELYASGSEDGTLRLGQTVVGKTYGLWKCVLPEEESGELAKPKIGFPETTEEELEEIVSEDSDCIYSSTPDVKA

SEQ ID NO: 4476 - protein, 50 aa, Homo sapiens
LGEVVYGYGAVHLGTCSSPGRLVTRCEMGRFCLLIYPCRAGRVVDEGGMI

SEQ ID NO: 4477 - protein, 132 aa, Homo sapiens
LQHLSGASRMCPACHTASRKQSVMQVFWPEPHKDHEGAGGARPVAAVPGVGAACPAAGAGCTRSGRNTHLPLAGRRDRGAAGVRPVPPRHLCAAAVPPRQPHDVWPVSTAPLHAVLELPRALPLLQRPLRGA

SEQ ID NO: 4478 - protein, 84 aa, Homo sapiens
LSPPPQGRGQRARIRAFRGSRALRAPPYPRGWRAAPEAPARLAVPRLPARASYSTRALNLSVTQALSPESLASWFKRNGRKGAM

SEQ ID NO: 4479 - protein, 118 aa, Homo sapiens
VAAGCGEGTASGEQSRRPWGLRPGARREGVWACAHVTGGEGRGQRARIRAFRGSRALRAPPYPRGWRAAPEAPARLAVPRLPARASYSTRALNLSVTQALSPESLASWFKRNGRKGAM

SEQ ID NO: 4480 - protein, 97 aa, Homo sapiens
LAAAPKQRPRPGEGQAGVQGRGQRARIRAFRGSRALRAPPYPRGWRAAPEAPARLAVPRLPARASYSTRALNLSVTQALSPESLASWFKRNGRKGAM

SEQ ID NO: 4481 - protein, 37 aa, Homo sapiens
VARRARARPRALPGTRAKTTAGARAAAPRSTRSPDRA

SEQ ID NO: 4482 - protein, 97 aa, Homo sapiens
LSVPSFSPRISLNTLTLNVKSEKVYTRHGVPISVTGIAQVKLSEPFPHSPLPHHPLSQTLRHLLATVFSTLACREVPLLVSSFPGTPRHLPPPPFFP

SEQ ID NO: 4483 - protein, 127 aa, Homo sapiens
LGGSPELGQWSHPERAGGSGCGSVGPVCGTKILQIMTPKGALWGPGSDPCLDLSEVFAFSVPLQGSPLKSTEALASVHSSFGGPLRGGQSGCRGTSTLHGASGPSLWAQGLWPSPPSALWDLLSPVC

SEQ ID NO: 4484 - protein, 79 aa, Homo sapiens
LPSPSLPLLILSRSAALQCDESESSSHPARAFLLLPALFYFSFGRRRHCCTQLVSVPRFYPQVVPAAYGPGRLGYFCSR

SEQ ID NO: 4485 - protein, 51 aa, Homo sapiens
LTGWTFNGHFWDPEETSSLQAYCLSVKFQSKEPCSSKGIQEFRRASPTPVR

SEQ ID NO: 4486 - protein, 330 aa, Homo sapiens
LLLVCGGAFLPSLHWALDLHGQEAPRPRLFANSNRLLAGPRQGGLGRKSSLLYLHCTQRPVRGVPDRTPSSLVKCPCSSLVSTPWIFPPQKYNADYDLSARQGADTLAFMSLLEEKLLPVLVHTFWIDTKNYVEVTRKWYAEAMPFPLNFFLPGRMQRQYMERLQLLTGEHRPEDEEELEKELYREARECLTLLSQRLGSQKFFFGDAPASLDAFVFSYLALLLQAKLPSGKLQVHLRGLHNLCAYCTHILSLYFPWDGAEVPPQRQTPAGPETEEEPYRRRNQILSVLAGLAAMVGYALLSGIVSIQRATPARAPGTRTLGMAEEDEEE

SEQ ID NO: 4487 - protein, 20 aa, Homo sapiens
LNYSIIEMRIYTQNDPVLFS

SEQ ID NO: 4488 - protein, 117 aa, Homo sapiens
VAAGEGRPPRRARGSGRRRAVRPSGWGRDAMQLAGPRGAAGCRGPAPVLRGVWGPVWPAWLSRLPSDLGAPETHTWGSAVSAGRTGALLEHPRPHPSIDRCPLSASSSAPASFRYCF

SEQ ID NO: 4489 - protein, 106 aa, Homo sapiens
VRAAPGQGPAAGGRREAAPGRQGRSQRDPSSPRAPGAAFSAQLTFSTSPAGPEAGNHLSPLVSVSLSLSGSLSPSLSGSLVSLSLGLCPPPPGFLSPLSESVPLPP

SEQ ID NO: 4490 - protein, 116 aa, Homo sapiens
LRRCAPGFAATKTQRVQRRPPRRFENMAKRNAEKELTDRNWDQEDEAEEVGTFSMASEEVLKNRAIKKAKRRNVGFEVSAPLQLLLLNTHLISGLHSNPSAGSNDINKCFLKILIL

SEQ ID NO: 4491 - protein, 127 aa, Homo sapiens
LWRTGQRGGQQAQSPQGRRTRSRDVLWAVALCGPVPTMSLEAPPPWGSQSPLPSLLSLGTLLPFPPALILLSDMAQAFLPGPCLARLAEGTLLLCTLGTRAGLALPMPPSHPHGALASSKHPPWWMD

SEQ ID NO: 4492 - protein, 138 aa, Homo sapiens
LVRNLWIHLACQVLLFAVPSRLQKHLWCFSFWIYMQETYICLYTDRIIYKYIYACPRAWFSSLLPTKRNVLEPMDNKNTINILLSLFFKRGREREELFNIWPSFGCTLSTTKYLWLQIRCKRGLERKDIDLQLTGFDL

SEQ ID NO: 4493 - protein, 121 aa, Homo sapiens
LGLTHMPLRKRSGCSHACKAHKVDGRNTEPKRAASREDSQRPGAHLTVKKILAGGFKEDTEEHHLRDYFEQYGEIEVIEIMTDRSSGNKRGFAFVTFDDHDSVDKIVIQKYHPVGMATTLK

SEQ ID NO: 4494 - protein, 140 aa, Homo sapiens
LRFTRINHFPSSKQVFKYFTASGCGMQGSKARAKAKTHSSRAGLQFSVGRVHRLLRKGNYAKRVRAGAPVYLEAVLEYLTAKILELAGNAARDKKTRVTPRRLQLAIHDEKLNKLLGKVTIAQGGVLPNIQAVLLPCLYK

SEQ ID NO: 4495 - protein, 98 aa, Homo sapiens
LTEAGWVQGRGGGEGPARAAPVGVAPPFPPQSHGEPGLWRGALGAGSLHSPAAAAGDKPPRPRGPELLPLATQDAGSGERTGCPVAGSGAATAWPGLV

SEQ ID NO: 4496 - protein, 39 aa, Homo sapiens
LNPALIEARKPRDSYQPMPGPFSRTTRNCHSPGATLASG

SEQ ID NO: 4497 - protein, 90 aa, Homo sapiens
LERLLWGSESRDQTLTHLLPFLQPTLVCPHAFPGLLHVGCTQVLSPAVPPAGVRSCVSSPPQEGRGLLQALLCVAWQDTLSNQLPTSTPL

SEQ ID NO: 4498 - protein, 68 aa, Homo sapiens
LPSAADKVNNSPKTSQRGSDDQPSQWPRKVNGLLSLALSACELHLGPKLTDCAEATLSRRSLLVLLTS

SEQ ID NO: 4499 - protein, 198 aa, Homo sapiens
LRGGPCSRCLTSGSSCWPVLGWKLSAWWSFPVVRSCAQSRDPSRQHLPLVICSGISNQPLEFTFQKRDLPQMMDEVGRILCNLCGVVSGGVVCFFSSYEYLRQVHAHWEKGGLLGRLAARKKIFQEPKSAHQVEQVLLAYSRCIQACGQERGQVTEALLLSVVGGKMSEGINFSDNLGRSDQPAGGRGSAALGLALRE

SEQ ID NO: 4500 - protein, 55 aa, Homo sapiens
LLYALPHLFRFPDAGNGGEQLQSLGSLYHLPHEPQHVSGCDSLLHRFKTISGSSH

SEQ ID NO: 4501 - protein, 139 aa, Homo sapiens
LSHCTQPRQQSETLSQNKTEITKNKVTCWRPHGCEPNTGLGYQGSHTSKYTLLPWNLLKTKPLPPSHGKEGGKEAKVPSGDNSGRGEVPRAQEGQAACGRAASGDSQEGMRRGYEERATAQRPAVRSAETTAHGTWIYP

SEQ ID NO: 4502 - protein, 197 aa, Homo sapiens
LLARGSASQPTPNPTVWGEKQNLCFPSLLAPDNQHVRPFPLHHSDSCPLWGTWGRLWLPGSVPYFSAFLGHRGLLDAPQAFCAQASVPSGEVAVSEGEEVICSPSPSAHLQHLLPLPWPCRAFSSSLWLVPGHPSCPGSLLPNCKMPAASSSFVPDPQAVPSRLSSADPPEWRRPLHEEGSSPRHLSSDPPAASAQV

SEQ ID NO: 4503 - protein, 39 aa, Homo sapiens
LSEFPLWKKKLLFNLPKCLTHSLQINQPTYTALSRPNFR

SEQ ID NO: 4504 - protein, 128 aa, Homo sapiens
LGGVRRGGGSRESPGVWAGVSRGPSGRIAAPEGGRPAGLQSPGRSGRLRALGGRLRGVPALQPQRPPRAAVPGAGKSRAGAVASGAGRGGGGGAGGRAESPPPGRPAAAREEAGPARPALAMAVWAAT

SEQ ID NO: 4505 - protein, 106 aa, Homo sapiens
VGSREQHSERVFASLSVPRCPPTRFLTDLSKVLLSSPISVGGMQRVQGVQVPVGVARPGGPPGRRPPKGGAGVSQTRGWGRPQTASKPQPLPQSHEPRQRTTGAGL

SEQ ID NO: 4506 - protein, 10 aa, Homo sapiens
VHCASFFGNI

SEQ ID NO: 4507 - protein, 55 aa, Homo sapiens
LYCTPLKKTLPLIYQYKKDPLRGGGHFCVMATSLLGRGACSRIRRRQPNLSPPVE

SEQ ID NO: 4508 - protein, 32 aa, Homo sapiens
VSRKEDVGRDGVQRIVWVRGASSIIFVSLELC

SEQ ID NO: 4509 - protein, 83 aa, Homo sapiens
VEARYEPVGASPTPQSQRQTVLGRTDARAEEAARSLLTSVSPSNHQPRKGPREPLPVQKSSLHPFLCGKTNCQSLHSLRAWVA

SEQ ID NO: 4510 - protein, 134 aa, Homo sapiens
LHCRHRGEEKASTKAGKHHKPCKSCDDLQSSPGGRLCSTAGSGSTQPRGFQKIISYSPNLTLLSASALSTSLPEMNPISIGFFILLPGLSETKTSWKEFQRDPKKKMVATEPQPHTIPEGPRGIRVRTTEGCDH

SEQ ID NO: 4511 - protein, 87 aa, Homo sapiens
LRGTHTCRCENADPRGRNSESRLERDLESDSLETAPRWIRTWLPLSVTQLKAGRSFLFCTWNNKVKMTESPTSTMEKAMVPKSCQVF

SEQ ID NO: 4512 - protein, 116 aa, Homo sapiens
LPATWCGHHSAPTPALLLRVENSRVPCHRLPSHSKPPGSCPSWSRKCLYLSHPQTAWPDAGTGWNEGGVFISLPSPSHATPAPTGLQVLLMRWDLIEDKKEGEMTPTPSSPSFEKV

SEQ ID NO: 4513 - protein, 46 aa, Homo sapiens
LGGGSHVFTGTVVRAGFAAVRALNPPVELLSRETAGEWLGTNHGNP

SEQ ID NO: 4514 - protein, 67 aa, Homo sapiens
LLTPPSPSFPQSSAAVLPSLYPRRAAARGAAPFPPSPVGLLPLPEPRVRTAEAAGVIWRTMHVSLTS

SEQ ID NO: 4515 - protein, 115 aa, Homo sapiens
LRPAQGCRTPASPSGTSWTCPRPTSSSKVKVSVPLRGKQAGGDSTLSGCVGHHRCWRTVCCHPVGLHITREHLLKGRWGRVRWLTPVIPALWEAKAGRGKEIETILANTVKLRLY

SEQ ID NO: 4516 - protein, 47 aa, Homo sapiens
LMCYYWGGWSSKKRRRKKRAGLCWQRLSAGLTCGGDGRTYGVRLQVF

SEQ ID NO: 4517 - protein, 104 aa, Homo sapiens
LRRRVQPLVRGAVHRLRSGSAQPFAQAPRPAARVRERACAAGAAARGGERPPQEDPFSPRNYSMLKPLKVVLETLKAPWTGFMISKSLLWSQGNLDLRNAEGGL

SEQ ID NO: 4518 - protein, 72 aa, Homo sapiens
MISVTKTDNQEACVLSESSMFVSKKRFILKTRGTTLLLKALVPLLKLARHYSGFDSIQSFFYSCENFMKPSP

SEQ ID NO: 4519 - protein, 8 aa, Homo sapiens
MELVGEGG

SEQ ID NO: 4520 - protein, 385 aa, Homo sapiens
MWKSWKLRTDVRVREGAGGSPCASSQPGSRGPCFLPGLSSQEVSRRRQFLREHAAPFSAFLTDSFGRQHSYLRISLTEKCNLRCQYCMPEEGVPLTPKANLLTTEEILTLARLFVKEGIDKIRLTGGEPLIRPDVVDIVAQLQRLEGLRTIGVTTNGINLARLLPQLQKAGLSAINISLDTLVPAKFEFIVRRKGFHKVMEGIHKAIELGYNPVKVNCVVMRGLNEDELLDFAALTEGLPLDVRFIEYMPFDGNKWNFKKMVSYKEMLDTVRQQWPELEKVPEEESSTAKAFKIPGFQGQISFITSMSEHFCGTCNRLRITADGNLKVCLFGNSEVSLRDHLRAGASEQELLRIIGAAVGRKKRQHAGMFSISQMKNRPMILIGG

SEQ ID NO: 4521 - protein, 75 aa, Homo sapiens
LNFINWALRAPARSQKGEGRRELACGTPDRRGCAFPAPGPSRHTRSSPLARANAQDDHHPRVCHHLRLERSFMQG

SEQ ID NO: 4522 - protein, 33 aa, Homo sapiens
LEGVEWHGLELNQENRAQEEETRRITQKVLRSS

SEQ ID NO: 4523 - protein, 91 aa, Homo sapiens
VPGRRPDQPGGGLPVWGEVDSLVQPSQLQILEETEQGAQASGSHGPCLRACQHGELGPGRCVCSVGTDSSGAGEEAGGQEQHTDTGRQLEV

SEQ ID NO: 4524 - protein, 82 aa, Homo sapiens
LEKQEAQLFRIKNKNNNNKNLHLHSQIKLTLWHQTPWGDFSSRRVQVDRVLHPGYSRRGPSSHSHWVSGFQRSQSVSSRSLF

SEQ ID NO: 4525 - protein, 100 aa, Homo sapiens
VRLSCPISLGCPCFVLWTTAQQCPALCLGLGPSCTCCLDPRPAWAWALVLPMTPPERLFLPRVCGTTLHLLLLGLLLVLLPGAQVRQQENGGCWGGSAKP

SEQ ID NO: 4526 - protein, 67 aa, Homo sapiens
MRTALMLAVHYDSPGIVNILLKQNINVFTQDVWTRCRRLRYFSLFDRIQQQILEHKKMILKNECWKF

SEQ ID NO: 4527 - protein, 53 aa, Homo sapiens
VNGQRKYGGPPPGWVGSPPPAGSEVFIGRLPQEVYEHQLSCCSSAWAASTSSA

SEQ ID NO: 4528 - protein, 29 aa, Homo sapiens
LLSPSTLSPLVPLCPMHSHLSQPPGRNVG

SEQ ID NO: 4529 - protein, 86 aa, Homo sapiens
LGTASAWPVSFELSPLPYPLTSSRRKPPGSPGCPARWCPSSSCPSPLPCRSCTPTCIAARSRSWRYFTRWARVRTRESPGRSSSRL

SEQ ID NO: 4530 - protein, 77 aa, Homo sapiens
VPSQMPPRQLPGPPGRKPPGSPGCPARWCPSSSCPSPLPCRSCTPTCIAARSRSWRYFTRWARVRTRESPGRSSSRL

SEQ ID NO: 4531 - protein, 73 aa, Homo sapiens
LQAPARRVSGVRKDRALLADPVFRFQPPISERSRQRAGNRHGQSRGDRHRPGHHLLLRGGVPTRQGGAQRAHL

SEQ ID NO: 4532 - protein, 230 aa, Homo sapiens
MTPEENAGTKLLLQGFESRFLVARTLRSFPWQSLEAKLRDSSDSELLQDILQKTVRHPVCVKHPPSVKYAWCFLSELIKKHEAVHTEPLDELYEALAETLMAKESPQGHRSYLLPSGGSVTLSESMAIISHSTTGLVTWDAALYIAEWAIENPAAFTHRSVLELGSGASLTGLAICKICRPRAYIFSDCHSRVLEQLQGNVLLNGLSLEADITANLDSPRVTMAQRWTGT

SEQ ID NO: 4533 - protein, 229 aa, Homo sapiens
MTPEENAGTKLLLQGFESRFLVARTLRSFPWQSLEAKLRDSSDSELLQDILQKTVRHPVCVKHPPSVKYAWCFLSELIKKHEAVHTEPLDELYEALAETLMAKESPQGHRSYLLPSGGSVTLSESMAIISHSTTGLVTWDAALYIAEWAIENPAAFTHSVLELGSGASLTGLAICKICRPRAYIFSDCHSRVLEQLQGNVLLNGLSLEADITANLDSPRVTMAQRWTGT

SEQ ID NO: 4534 - protein, 28 aa, Homo sapiens
LPAQPLPWGGALPCAARGWCSVRVPPGA

SEQ ID NO: 4535 - protein, 68 aa, Homo sapiens
MLLEQPPRSRPRRHLLFLRRSFLRRCRACGAEGPGRARRAPPRRLASLAAFRPQWSAGRPLLRPGRGL

SEQ ID NO: 4536 - protein, 91 aa, Homo sapiens
LKNWNRKECGGRGRGLFVCSWNARRGMVECVASRDRTTGGMFCASTVTLFPAWGLWERWRETGTEMVRQGESHKEEDREKEDKCIKRFRDV

SEQ ID NO: 4537 - protein, 101 aa, Homo sapiens
VKKPHHYRPGTVALREIRRYQKATELLIRKLRFQRLVQEIAQDLKTDLRFQSAAIGALQEASEAYLVGLFEDSNLCAIHAKRLTIMPKEIQLARRIQGKRA

SEQ ID NO: 4538 - protein, 90 aa, Homo sapiens
LARLFLRPRGPRSPIIQFRRVTGAAVASQGAGSLSPALLPLAPSPRPRRAGLRGQGPSGEGYHLTWKKMSSLEKKHSNVIVQNSLNIHNR

SEQ ID NO: 4539 - protein, 119 aa, Homo sapiens
LWPVWGLQRPPGLQRVLCPQRQADPAPVWEPAEVGWAHGAVPGPAALAGRQLHGRGGHLPPHPAGAGLCGVPRTGGQHCVPGRLRPGPVPLPHLPVCHLCGILTPVRPRGGPAAELEVP

SEQ ID NO: 4540 - protein, 30 aa, Homo sapiens
LSAVGMRGGAWWNVSRPGTGRQEACSALAP

SEQ ID NO: 4541 - protein, 64 aa, Homo sapiens
VAPPGGPCAPERDSRHWKARPVGGRVGRLGRPRSGSGSQVAGAVATLAPTGLFPDHEGIFPSSN

SEQ ID NO: 4542 - protein, 121 aa, Homo sapiens
LSWMPGSRIAAQFQQDSAFPHALGGDPPFLPLTHAECRAGAWVAGGGRVGGGSSLSLCTLFLGCLVLAPGDYKSQSAVCPASFLIDPAWGRWCMVTELCILGHVVAQVGLSLAVRWGDFVF

SEQ ID NO: 4543 - protein, 28 aa, Homo sapiens
LRGPSFLISSTEMWPSSTRSTPSPMTCL

SEQ ID NO: 4544 - protein, 168 aa, Homo sapiens
LGPDGRPHPPAFRPGSLAEPEPRELPACCPSPLCCDWVVSCPAWGCFSSPSPGPAAAVTPTIHTTVLTAQPEEQRMPWVGLWGSDRGVVGRGQPWAPHRVDRQTPDCPGAGAAGTALAPDLVGLLLAAEMSSVTGLAGGGVLTTQSCSPVWGGRGRVPNVRAASGRCS

SEQ ID NO: 4545 - protein, 74 aa, Homo sapiens
VLVALCPRGRGFCISCLCPTPKVRRNMFPVASMSFIALHPLLPEAALGVPGQSPHRPLWQTQCCVAPPQPRAEF

SEQ ID NO: 4546 - protein, 39 aa, Homo sapiens
LQNILLKRGNTRSSMNVIGYRNSLSLQDFLESYIFVHQT

SEQ ID NO: 4547 - protein, 79 aa, Homo sapiens
LELPSYSTTREVAWQSVLMTRPRSHSQIQFSLLLNRFRRLGDLENEINEMLLGIFINHILMLPQIMKEYFAESSQSKRG

SEQ ID NO: 4548 - protein, 47 aa, Homo sapiens
LPPRLMHKAKELPRSLRYRVTLSSGEKGESERRVLCILPPCLSPSCL

SEQ ID NO: 4549 - protein, 27 aa, Homo sapiens
VAHQSTQKNQYGIRGQWPTLNKDMSDV

SEQ ID NO: 4550 - protein, 63 aa, Homo sapiens
VAESQPWALSRVPFRKRPPIRRLRAAVIPWFNKAAARSPSPLPRLLPRRARAGRGGAWSRAAA

SEQ ID NO: 4551 - protein, 21 aa, Homo sapiens
MEYDGSLFQAVGIGTLLTAAR

SEQ ID NO: 4552 - protein, 100 aa, Homo sapiens [sequence omitted]

SEQ ID NO: 4553 - protein, 282 aa, Homo sapiens
VERNLMRVLNVARHSVVVHTLLSIKEFTLVRSPIHVLNVERLLVRTHILLYIRESILERNLMNAMNVVGPLVRVHILLNIKECIQEKNSMNVMNVRKPSMITQLLFNIILSILQRNPMNIMTGKTFSYCSDLIQHQRMHTGEKPYKCNECGNAFSDCSSLIQHQRTHTGEEPYECKQCGKAFSRSTYLTQHQRSHAGEKQYKCNECEKTFSLSSFLTQHMRVQTGEKPYKYNEYGKAFSDCSGHFQRTHTGEKPCECNDCGKPFSFCSALIQHKRIHTRKKP

SEQ ID NO: 4554 - protein, 43 aa, Homo sapiens
MALASGEVIPWWKASHGKQACKTEEKGAKHAKANPLSRKMAGL

SEQ ID NO: 4555 - protein, 309 aa, Homo sapiens
LHNFSLPEEDTKLKIPLIHRALQLAQRPVSLLASPWTSPTRLKTRGAGNGKGPLKGQPRDIYHQTWARYIVKFLDAYAEHKLQFWAVTAENEPSAGLLSGYPFQCLGFTPEHQRDFIARDLGPTLANGTHHNVRLLMLDDQRLLLPHWAKVVLTDPEAAKGLCGFQVLGAECAARLLGSRDAVQPQHHHSLHTSLPLLQLLRHLQLPQTSQLPLRCLDLHTPNSLATKECAPHRADLPTAASPTRDPYLHSLGTPSVAPLSPCLCPYPRTSCTMWSAGPTGTHHCRHHQAHVLQTAHVLPPWPLQQVHS

SEQ ID NO: 4556 - protein, 24 aa, Homo sapiens
LRVLCTISTMRAGPTLAFLQLPLG

SEQ ID NO: 4557 - protein, 505 aa, Homo sapiens
LSTHRLGLAAVLCVASASAAWEQSAVGRAVSCCRPRGWPFRTLWAVSAALWSGRGPILASKTPSLPWSTQLGAWWKDPTAGGVTQEASPGAWHWGRQWEVSRTTSSTCLIPRPRSPLHVRLWGGTSDLVRGPGAPPPALLQSKAQWQTPCPAQGGVPALPRTLQPLGPLHRGPGWGRTALPPGASGRAGPKCSSATAPAPGGRRAGPDPSARGPHQLPAAVLTGSSALPALQAGGWREVPCPPARGRQAPPPPDADKPTALQPRGAHLPPPQLWLPPQALLGRPVPQAVPWGAHLPLEAERGQAGLRELLARLAPPHGHSQPSALPGWHQLSWRMSCALWTLLCAPEHGRPCYHTLGLEVIGSEQMWGWPARLAALHHWHCLPWDPLPTCCGHHGGEHSNPRCPEHCPMPTLCTQVQRVRPPQQPQVEGWSPWGLPSGSALAVGVEGPCQDEPPSPRHPLAPSAEQHPASGGLKQSLTPVPSGPGPSLPEPHGVYLRMFPGEVAL

SEQ ID NO: 4558 - protein, 58 aa, Homo sapiens
MAFTLTSPWAYDVTRSHHAQRPGPSRQNRGLSVEPLARPHDGGARKRGRNRRGPWTEQ

SEQ ID NO: 4559 - protein, 90 aa, Homo sapiens
LCRVWFAIKRWQFSHNQGQGEGEAPRRGRGPASAALSLEGDWLERLPAGSGMNGGDRGLWVVRASCCLLIWSMCHSSPGEPLCVTANLSH

SEQ ID NO: 4560 - protein, 234 aa, Homo sapiens
MEMGRRIHSELRNRAPSDVKELALDNSRSNEGKLEALTDEFEELEFLSKINGGLTSISDLPKLKLRKLELRVSGGLEVLAEKCPNLTHLYLSGNKIKDLSTIEPLKQLENLKSLDLFNCEVTNLNDYGENVFKLLLQLTYLDSCYWDHKEAPYSDIEDHVEGLDDEEEGEHEEEYDEDAQVVEDEEGEEEEEEGEEEDVSGGDEEDEEGYNDGEVDGEEDEEELGEEERGQKRK

SEQ ID NO: 4561 - protein, 91 aa, Homo sapiens
MPLWEAPAAGAAQPRCCPCGEAGSARHSAGRPGSGSGHHEDPGESAGEAPPRPWANGPSFLDVDPPTGTSLGSWPWSQTSALLEAEGTHEA

SEQ ID NO: 4562 - protein, 52 aa, Homo sapiens
LQLMEDEPQLLKMSHLSSSFLPSFLEISRAFGETDFPNPLPGRCPCFCGCCC

SEQ ID NO: 4563 - protein, 190 aa, Homo sapiens
VEVMRGSTDPGQCAAQRRAAKPSGRGSDVTARDAEAGQLADGAGRPLAEGPRPHLVRQGPGAMRGPEPRGGTGSRAGGGARGAAGRPWLQEREEAAHGPEQGGLRGGLQAGRRRPRGEGRGPAAGAGERKWLRGPRGDVPRGQGGRQTGAVCVHASPRRERRARDLGSLGQEEAAGGGSDGKQVRLCHLG

SEQ ID NO: 4564 - protein, 32 aa, Homo sapiens
VVVYSSVELRAPWTSQVFRVFHLELYKVQKTW

SEQ ID NO: 4565 - protein, 118 aa, Homo sapiens
LREQHHQHHAITIPNHGGFSQLYTKGHHYPSKRETWTHVPKRRLPAERAANRNHRSWDCPDPVLPVDFKSGGHLGFCSLPLPLQSSNFHHFDVWVPIFRSSVFWHYWIPLNYLWKTIN

SEQ ID NO: 4566 - protein, 7 aa, Homo sapiens
LNFMSSF

SEQ ID NO: 4567 - protein, 93 aa, Homo sapiens
VSVRPGPGALRRQTGHGPGAAPMRVPGGGARAAAAGPWGRRCCRSCARGCGPRSPAVGSSTRTRAPSPTASTSMSGSSCSSFPSYCTWSCLPA

SEQ ID NO: 4568 - protein, 55 aa, Homo sapiens
LFLFPGLRLRQAGLAPSAPCPRPAASSLHSHFLSSAMGALEARPGRSRPWGAHRP

SEQ ID NO: 4569 - protein, 124 aa, Homo sapiens
MTASTSPTRWGRAGLPPQRRARGGRTGARPQRPPPQVRGNKPSCLLAEQNRGQFFTVYKPNIGRQSQLEALDSLRRKFHRVGGRRAQLSLGLPALTPPRLMRPCVPRSPRRRPRSPGRVATLCR

SEQ ID NO: 4570 - protein, 102 aa, Homo sapiens
LGRPSPRRDALQANGEGPEVGPGTEEPAHRLPVGSGSAARSQKGEGRRELACGTPDRRGCAFPAPGPSRHTRSSPLARANAQDDHHPRVCHHLRLERSFMQG

SEQ ID NO: 4571 - protein, 104 aa, Homo sapiens
LAPGAAGGCRGRRGRSPQLLTLQGPGEEPVRPLVPKPPPLTWVCLAAGALQGQHSWGAGQAATPGTPLRRDFLFLKAVDLQRGLMLPCTALAPAGPPGWAVAGG

SEQ ID NO: 4572 - protein, 52 aa, Homo sapiens
LGKARQAISSHLTLLAPVVMASENVRCCIAEEARKAHLASCSSASRGSTFRS

SEQ ID NO: 4573 - protein, 144 aa, Homo sapiens [sequence omitted]

SEQ ID NO: 4574 - protein, 37 aa, Homo sapiens
LGARGPPALARPGTPPDPDFLLRGPSPPAEAVTSDPW

SEQ ID NO: 4575 - protein, 227 aa, Homo sapiens
LGARRGLRPSRPSSRHRNRVPAPPPGRPLATPHRRRFPPDPALTCPGLGQDQGPREQQKQGSGRHDTILGDWEESESRWVRGNFRTGTAATLIGFSRNPTLNGSENWGSPVSTQEEGPDTGWEREKRNPAKMGNAQRWASPIHTPPLGPEILRATPEALGLRPDPATSVPSALSQCFPESWPRSCLRNQGETLGMGPVPLSSLCITESPSQNWTPCLLLLTCPRGLF

SEQ ID NO: 4576 - protein, 74 aa, Homo sapiens
LGSLRGSVVSPGKTTSTENAEREHLDGAPKGSVQKDMFVESSYREKIKRFDDFSKIMNSEASGGFSVWPLKEGL

SEQ ID NO: 4577 - protein, 62 aa, Homo sapiens
LLSGECCAVEYCEVCCEVCLVIPESRLHSCPNIEAHGSYGRSESTANFCKCSHISYKFHFSK

SEQ ID NO: 4578 - protein, 63 aa, Homo sapiens
LRRQRQRPRPGLRSGPEDRRWAGGEGLAQPAVVTRAPRLQAPAAGMDRRGGGRGGGGGGGRPG

SEQ ID NO: 4579 - protein, 164 aa, Homo sapiens
LPAPAGHCPGDTRGLYLDPTAAARAPEDRPLLSPSVCGPAAAQLFRAHTRCGASGHALGGRSQGRVQCGAHSRVLCAPPGPLPGQILHPGARPGGGSLPIPAQGHCAERGQRGAGAAGQSCSTAPGQPRTPCGLLPPRAGQARASGHQAPDHQWPDCEPGPWSL

SEQ ID NO: 4580 - protein, 68 aa, Homo sapiens
MSRQSVSSLPSSQMLSLQQTCRIAQKPLCRWSGSCGGWLPTGNTNGLLKSMWPLPSATKRRASCSPPS

SEQ ID NO: 4581 - protein, 13 aa, Homo sapiens
LAVSQEDRSCQAD

SEQ ID NO: 4582 - protein, 52 aa, Homo sapiens
MSGPGDVLYETFFLRYINHTWKSLSVIHANPQRGRADQLTLLGSLTLLPFTG

SEQ ID NO: 4583 - protein, 116 aa, Homo sapiens
LLTPSPVTVTVSTRWVRPRVAAGAGLRALWRGVKPWLCLPVGLPDARPPGAAAHGGRSLPTRLVLQDRSHPEEAPRRREEVPEGVWHGAPGPLVHSLPLEESLPAVPGLSPARSRT

SEQ ID NO: 4584 - protein, 27 aa, Homo sapiens
LQVDKALSGNGVHIQAGRSKRHWYQWL

SEQ ID NO: 4585 - protein, 36 aa, Homo sapiens
LCGLRFLLVVTVGAVSAFLFRGGHLGQNTLPATLFL

SEQ ID NO: 4586 - protein, 48 aa, Homo sapiens
LCPNLCAQLHRMWWGQREGQSHHWTQLIREEHIPQTAANPSPLASPPS

SEQ ID NO: 4587 - protein, 34 aa, Homo sapiens
LRCSAVPVKQRLNVPGGGGSRWWPGVLAWRHLQQ

SEQ ID NO: 4588 - protein, 37 aa, Homo sapiens
MWKRRARGNCAVTIAPPPQKAPKRRLGAERGHPAFVC

SEQ ID NO: 4589 - protein, 138 aa, Homo sapiens
LAEGPRPHLVRQGPGAMRGPEPRGGTGSRAGGGARGAAGRPWLQEREEAAHGPEQGGLRGGLQAGRRRPRGEGRGPAAGAGERKWLRGPRGDVPRGQGGRQTGAVCVHASPRRERRARDLGSLGQEEAAGGGSDGKQL

SEQ ID NO: 4590 - protein, 144 aa, Homo sapiens
LAEGPRPHLVRQGPGAMRGPEPRGGTGSRAGGGARGAAGRPWLQEREEAAHGPEQGGLRGGLQAGRRRPRGEGRGPAAGAGERKWLRGPRGDVPRGQGGRQTGAVCVHASPRRERRARDLGSLGQEEAAGGGSDGKQGSFSGHP

SEQ ID NO: 4591 - protein, 186 aa, Homo sapiens
LYQVEPHDGTSALRKRKRFQNFLSVSLEDTAGRQPCLDLEAGLPASRTCVHFQVDRSWQRIEELCGRVSCFWSQMSLWQSLRSPATTGPRRIDRTSKTLCKDSECTKLQLTALSRGRETGCMLSCWEEGQEEKCLQLQEHPLEMPPVFNQVQSNCFLTPPGKTVQLGTVTAPCRVFPADVILPKVC

SEQ ID NO: 4592 - protein, 45 aa, Homo sapiens
LVKHSLMTMMDIYTYIHIIHNDICVRIYLRLYFVGWAKFSVTITS

SEQ ID NO: 4593 - protein, 108 aa, Homo sapiens
LQAPARRVSGVRKDRALLADPVFRFQPPISERSRQRAGNRHGQSRGDRHRPGHHLLLRGGVPTRQGGDHRQRPGQPHHPQLRGLHGHRAAHRGCGQEPGGAEPAEHRV

SEQ ID NO: 4594 - protein, 18 aa, Homo sapiens
MPAYACPEFPAACVSLSP

SEQ ID NO: 4595 - protein, 185 aa, Homo sapiens
LLLGPSRPASRAGFPLVSFLSPSGEDEAVFLPANLLGTFPLFPSSAWDPFPSPQPVAVLCSRAPAWSLAAQGSLRRCTIQSFPVCLQLCNNRCNSRRFFPLQKETQDSPPRLAPTRLLSGHWVSLCWTLSVSGPPRHGWDVLAVCPALFSRPSGAWWGCTPLPGRTPFPWVCTPRRLFIRLPTGT

SEQ ID NO: 4596 - protein, 269 aa, Homo sapiens
MVPMCSPPPPTLATTLAHLPTGSRRINDRPEVRMAIPGPRPGVSVPTSFWPGRSVIPVSWTLLGSSLLCSSGPGAAGWEGAAKKPELAAYPEIRGPPTPKSRVQLELAPPCSEAGRSLGDWCLCTDGGLWGSFLPALTSLFVPGLGLGQPWGIRRGHLGPAVYSEGGQPPPLHSASTKSAPESSRLLLFICAGPGRVKGQRDGHKEPAGGRSEDVLSRETSRESLAGLPQPRAPPGLRVPRPELGRCSESHCRPVCHAEVQLATRVPGT

SEQ ID NO: 4597 - protein, 124 aa, Homo sapiens
LLWAKPVVYRRKSMPEELMVLNIDHHRNSRNLSTVDDDIAFLWSRLAEQGYKGGNCLAAPTENKQTKNSYLKLLERVHGELVIQTQSKFANDIFHKKSPKSMAQPPPPHRRGIGDRWHVCLDRS

SEQ ID NO: 4598 - protein, 58 aa, Homo sapiens
LTDAHRHGVAAAAPLGARASDGSRDLSERRGQRSRSRRDMVADLISSEHLIVSPSLGI

SEQ ID NO: 4599 - protein, 25 aa, Homo sapiens
LRLRLWKTTKLKRRTQMEVWEPGMR

SEQ ID NO: 4600 - protein, 68 aa, Homo sapiens
LAAAFQGSRATRWGCWLREHGLLASAEVAAVEEPHFQKKTNMSAAAGSGLASIYLPDPDLCSAELPTL

SEQ ID NO: 4601 - protein, 148 aa, Homo sapiens
LGSVRWEEAPPVAPQVDRSWQRIEELCGRVSCFWSQMSLWQSLRSPATTGPRRIDRTSKTLCKDSECTKLQLTALSRGRETGCMLSCWEEGQEEKCLQLQEHPLEMPPVFNQVQSNCFLTPPGKTVQLGTVTAPCRVFPADVILPKVC

SEQ ID NO: 4602 - protein, 148 aa, Homo sapiens
MESNSPAHESRSRSEVDRSWQRIEELCGRVSCFWSQMSLWQSLRSPATTGPRRIDRTSKTLCKDSECTKLQLTALSRGRETGCMLSCWEEGQEEKCLQLQEHPLEMPPVFNQVQSNCFLTPPGKTVQLGTVTAPCRVFPADVILPKVC

SEQ ID NO: 4603 - protein, 139 aa, Homo sapiens
LNAHGKVDRSWQRIEELCGRVSCFWSQMSLWQSLRSPATTGPRRIDRTSKTLCKDSECTKLQLTALSRGRETGCMLSCWEEGQEEKCLQLQEHPLEMPPVFNQVQSNCFLTPPGKTVQLGTVTAPCRVFPADVILPKVC

SEQ ID NO: 4604 - protein, 109 aa, Homo sapiens
MRPSEGCLIAPALLTTLSQPLPSPHPQGLTAPHPLQAGTQLGISPAVTDFVQAKDLAGPDAVPSPRPGMGVGVPELMWCPLSLSEWLRLIPLTYLQSPSTQGRPDVATG

SEQ ID NO: 4605 - protein, 42 aa, Homo sapiens
MILFLLLETYCPARWCVMRTALRVMPLSTSRPKRLPTRPSRR

SEQ ID NO: 4606 - protein, 52 aa, Homo sapiens
LNGADCIMLSGETAKADYLEAGRMQHLIAHEAEATIYHLQLFEELPPTGAHY

SEQ ID NO: 4607 - protein, 151 aa, Homo sapiens
LGLRGRRRRGPTPLGRPAARRRATFPHCRRRDRRLRSPLRTAPRPGRSSGLGGRTRTKRKRRRRPGVVEALRAGGRREPFSPSPEAGLRSRMGWRARGSDPHESERPSHSHHRRLAPEREARSQIFSQGTTIRRGAGGLLPRTVLHQGPEP

SEQ ID NO: 4608 - protein, 86 aa, Homo sapiens
VTEGPGAPGREEIGQAGLPIAFLKILETLSFIELRHCPPLISSKTPVTRLKPCLVFRRSMGPRLKEPAPLLRATVTTLRENTAPIS

SEQ ID NO: 4609 - protein, 16 aa, Homo sapiens
LGSPRGIQQRGEEREM

SEQ ID NO: 4610 - protein, 128 aa, Homo sapiens
VAVFCQVYLLSCSWLRFADLCIHCGLLGTSNWKFFTPAMAGRNFGPQLRLPDSGRYSQSQLPSELGEREKGKYKKTQPCGLTPYSMIQAHSQLCVSRVIMVKRMVTSKDNHRASLLTLVRTRFLSLVL

SEQ ID NO: 4611 - protein, 45 aa, Homo sapiens
VERQPTLVSTVTPVPMLTCVSSPVIFLVPERWGWMSPSLSQLYVH

SEQ ID NO: 4612 - protein, 71 aa, Homo sapiens
MLVMAPRTVLLLLSAALALTETWAGECGSGGKWPLPGGARGPQAGAQDLRSRAGRRVGRVSAPPHPQAPTP

SEQ ID NO: 4613 - protein, 155 aa, Homo sapiens
VTEGGGHLPASSAPACHVPPLPCCWSCGSSRGKAKGSHLPLPLCTTPSPHPYPWLYCSGCSWTEGTLGYGHRVTVTKMAQRGTAAAWPLLPKPAWSMQGAPGGGEVSHGAPSFIYGHGRPIWEPSYSFPFLFGPQMSLDAQRSWGGALFWGSGSQ

SEQ ID NO: 4614 - protein, 97 aa, Homo sapiens
MTAGGTELTTSLTGFPEGVKISRDGGAGTAGLRGRPWRDQEECRGVMTVRHPERSDWQTRTGRPCSCMIRELACGGSGRNCKAKGSGTDPENREEAE

SEQ ID NO: 4615 - protein, 195 aa, Homo sapiens
LAGHALGASACSGGEGFISAWPMTALKDRRERLWLWLESEAGAGGQGLSLGGDERGPEPCLPEGRARGHSPWRGWDPGSRGSVTAAWATACGDLTFLGKPMGQRSREIQAPSGRYGRTGAFAVEKLGVSVGKERNGSRGSSGAPGNAAYTLPRPPPSVHCAAWVLGQPEGRRLPCKARWGPACLGLNLDFMGLWL

SEQ ID NO: 4616 - protein, 114 aa, Homo sapiens
MDRGGPGGCGGHCQCSGPRILSPVVPVPQVCPSSEEAGEGSCQWAWCERDQPGRLLPAACRRPARPGGPHPPPAEARGQRRCQERRPSRPAPPGLPAGPLSGGEVSVRFECKTQ

SEQ ID NO: 4617 - protein, 43 aa, Homo sapiens
LLSHNGEEDGDIQGQPQGLSPDTGENQIPFPGSVAPSRVLEAD

SEQ ID NO: 4618 - protein, 214 aa, Homo sapiens [sequence omitted]

SEQ ID NO: 4619 - protein, 64 aa, Homo sapiens
MWPWVPWSSPSPSSSTLGHRPTSTPASWLPVRSSSSPRAPSWPCWQLLWTATSGSRSLSGTRWW

SEQ ID NO: 4620 - protein, 15 aa, Homo sapiens
LLFLVFLEMLSPSIF

SEQ ID NO: 4621 - protein, 135 aa, Homo sapiens [sequence omitted]

SEQ ID NO: 4622 - protein, 51 aa, Homo sapiens
LCVIQVHFSGYQVATYLKWCESYSFGTVVDFQIGKSKGPKRQLTVFPRAFC

SEQ ID NO: 4623 - protein, 136 aa, Homo sapiens
MHIRKAMKYLKDVTLQKQCVPFRRYNGGAGRCAQAKQWGWTQGQWPKKSAEFLLHMLKNAESNAELKGLNVDSLVIEHIQVNKAPKMCRWTYRAHGWINPSMSSPCHIEMILTEKEQIVPKPEEEVAQKKMISQRN

SEQ ID NO: 4624 - protein, 112 aa, Homo sapiens
LTQESALEGEHQRSFRKPPGPRAPCPHPTHVSLSLGEARGTRPHQPNIKDTIGTAAPAAPTPHRRLHLHGHPLRRTVDHQPPHHPRAELLQRDDAVPTTSLFFFFILLSLCF

SEQ ID NO: 4625 - protein, 56 aa, Homo sapiens
LTFFLGNSTVPPSFRKVKDTGFLDALSILSGCNVLLPEENQIIMWGLPLFLEYSYP

SEQ ID NO: 4626 - protein, 68 aa, Homo sapiens
LAPGRGRCPGAGRRDLAPNPGGPGAVAQGPGRGPGGGALRARPGAVPGGLAPRLLPSLRAQSPFGRAS

SEQ ID NO: 4627 - protein, 129 aa, Homo sapiens
MGFPAIFRTKCQVQVQVQGQARGGALSLTRPPLFSGIIAPTSPSRAGPSRDPRPAPPRRAPQEPPPPAGAAPVPWSRCPRSVPPKDLGARAGEGVEGGVEARYEPVGASPTPQSQRQTVLGRTDARAEG

SEQ ID NO: 4628 - protein, 134 aa, Homo sapiens
MGFPAIFRTKCQVQVQVQGQARGGALSLTRPPLFSGIIAPTSPSRAGPSRDPRPAPPRRAPQEPPPPAGAAPVPWSRCPRSVPPKDLGARAGEGVEGGVEARYEPVGASPTPQSQRQTVLGRTDARAERPSSFR

SEQ ID NO: 4629 - protein, 135 aa, Homo sapiens
MGFPAIFRTKCQVQVQVQGQARGGALSLTRPPLFSGIIAPTSPSRAGPSRDPRPAPPRRAPQEPPPPAGAAPVPWSRCPRSVPPKDLGARAGEGVEGGVEARYEPVGASPTPQSQRQTVLGRTDARAEWASASKS

SEQ ID NO: 4630 - protein, 145 aa, Homo sapiens
MGFPAIFRTKCQVQVQVQGQARGGALSLTRPPLFSGIIAPTSPSRAGPSRDPRPAPPRRAPQEPPPPAGAAPVPWSRCPRSVPPKDLGARAGEGVEGGVEARYEPVGASPTPQSQRQTVLGRTDARAECLEQLKSMCHLRFCRER

SEQ ID NO: 4631 - protein, 58 aa, Homo sapiens
LDPADSARPGLPRHGAAALLRQSVLAIPRALRPPRAGAGRGQLGLRGRRGGLAVRGDA

SEQ ID NO: 4632 - protein, 27 aa, Homo sapiens
LAVFLTFLKQITDTVLPEDFSNSVCKL

SEQ ID NO: 4633 - protein, 75 aa, Homo sapiens
LEGRGPSALGSQGALPAQPGLSWEPLAQRLSLANLGGCVHPARPSCGLHSSPCSLLPRFESRVCGHSLPSCTCPF

SEQ ID NO: 4634 - protein, 59 aa, Homo sapiens
LPMQISSHLSSCCNPSLPPIGLSLPNLNSLYRDGREFPSHLSATVIWYWLPGALSSEGF

SEQ ID NO: 4635 - protein, 82 aa, Homo sapiens
LLSHTSGLWAFGSTQEGHSAGPPCALSCRGHSPRPVSSPTCHHWPLLSLGEKSRPGTHGGPHVDATCCCFLLARPPPMPSIG

SEQ ID NO: 4636 - protein, 71 aa, Homo sapiens
MSRSLCCPQLPAAHFFPPVTFKSCVWDHGAADNLGFCQCVFLRVIGSQLTSIQQNQLHRRLTSGSHGCDGA

SEQ ID NO: 4637 - protein, 114 aa, Homo sapiens
LGIHVLSSPSPEDLKSRCLYHRQEPSGRVPGRRPDQPGGGLPVWGEVDSLVQPSQLQILEETEQGAQASGSHGPCLRACQHGRCVCSVGTDSSGAGEEAGGQEQHTDTGRQLEV

SEQ ID NO: 4638 - protein, 41 aa, Homo sapiens
MNLRQKRWRGRCVSILQGETTQNDSFRESMSLHRTLQTQEK

SEQ ID NO: 4639 - protein, 238 aa, Homo sapiens
LGYHVQPQCQPPAPHQAAGAALDLVQHGVPQQLPAPGSPGRILQSHHVLPQRLRHLHALRLAGAVVRPACPPTAQPLGQDRAGGLGGVQLEAGLGQGALLPEPAGSSQGGRVRTLPQAPAQGDHDGDAVPVQVLSGLRELLAPRLHHREAVEERPGGLGRARGAGPQQKQLREVPATRRLHPRGRLPEPQGPGPVPAGAGQGPRPLPELLSLAGDAAASLLQLGTGFLQGLLEAAAGI

SEQ ID NO: 4640 - protein, 31 aa, Homo sapiens
VAAADSLSRGAAEACGQCCQQLSDLARDHHG

SEQ ID NO: 4641 - protein, 76 aa, Homo sapiens [sequence omitted]

SEQ ID NO: 4642 - protein, 110 aa, Homo sapiens
MLRRDTKHVVLVVATLVPPSWVLAAETGTPTSPRCEPGEATPAVRDGCASWPRQGYLRWSSTADGYHEGGGTLAERWRNVGGVRGWTGTPGLKRSFHLSGTTDACLPINT

SEQ ID NO: 4643 - protein, 84 aa, Homo sapiens
LPEAAVWEFRSGGPSPPTRTGRGFCQMWAGPRGPWRAGPGPRPGWLGPRRCPPLATSSPGRVDSEARGLVRAHCRAERRSVLWF

SEQ ID NO: 4644 - protein, 97 aa, Homo sapiens
VGCTLPSIPIGPVPWSVSEPRGECSPPGAPGPPARHMVWPSLSPYPCPAPKGRKLQGPLPPTAQPLQAPWQLPLLEQKVPLSQPSADCLARCGDRLE

SEQ ID NO: 4645 - protein, 33 aa, Homo sapiens
LGGSAARSVGACSRAVWRTKLHKRCLSNSQLSL

SEQ ID NO: 4646 - protein, 81 aa, Homo sapiens
LRALRKPCECIGWGLEGSWAGAGQEQWVHFRQALLRSQAPAPAPWLGKPTLSVSMGAQAPGRVGWITSVLDLSQTGQPRAH

SEQ ID NO: 4647 - protein, 156 aa, Homo sapiens [sequence omitted]

SEQ ID NO: 4648 - protein, 77 aa, Homo sapiens
LQHVRIVTKSFINKGSFGEVEVWGKARKSVWSKQAKCGSCTGILLESGVGKELGRACGGTRSVSERACERIQNPREA

SEQ ID NO: 4649 - protein, 32 aa, Homo sapiens
MFHDDSTHGKFRGTVKAENGKLVINENTITIF

SEQ ID NO: 4650 - protein, 91 aa, Homo sapiens
MCQWSPPNPDTPALFRKSPDIRGSMALSVDTMHSSSQGGKVLWKGIETWNNRPVLIRDRKDGTRGVTLLHPHILMCSLSIQNRSRPLSKHS

SEQ ID NO: 4651 - protein, 61 aa, Homo sapiens
LTSFPNSTAKFPSRISPGAFLVAPLGLLRPEPRRGFMARAMDSLLWMKLRHSFHLFCILGF

SEQ ID NO: 4652 - protein, 22 aa, Homo sapiens
MKKSCRWVFFLITKSLFKETVA

SEQ ID NO: 4653 - protein, 198 aa, Homo sapiens
LPPPQDGRWPEEPRPSSDGLPRHLPDKVSSTSSSSGPGPGGGAEPYPAAFVLWHNRSHVPLPGGAQQRPPPRPAPPRPAGASSSRRRGACALVPVSPLGATEGSRGSGRGGGGGGSGGAIRTRGSLPNPAVPAANCAWSDGCPRGGVATGVPPPMTAVCRKLTWSWEAGRRHVGFHLDKPQKDSSSEGLANLRPATSL

SEQ ID NO: 4654 - protein, 202 aa, Homo sapiens
LPPPQDGRWPEEPRPSSDGLPRHLPDKVSSTSSSSGPGPGGGAEPYPAAFVLWHNRSHVPLPGGAQQRPPPRPAPPRPAGASSSRRRGACALVPVSPLGATEGSRGSGRGGGGGGSGGAIRTRGSLPNPAVPAANCAWSDGCPRGGVATGVPPPMTAVCRKLTWSWEAGRRHVGFHLDKPQKDSSSEGLANLRPDPFLDTSC

SEQ ID NO: 4655 - protein, 197 aa, Homo sapiens
LPPPQDGRWPEEPRPSSDGLPRHLPDKVSSTSSSSGPGPGGGAEPYPAAFVLWHNRSHVPLPGGAQQRPPPRPAPPRPAGASSSRRRGACALVPVSPLGATEGSRGSGRGGGGGGSGGAIRTRGSLPNPAVPAANCAWSDGCPRGGVATGVPPPMTAVCRKLTWSWEAGRRHVGFHLDKPQKDSSSEGLANLRPGSC

SEQ ID NO: 4656 - protein, 126 aa, Homo sapiens
LVPVSPLGATEGSRGSGRGGGGGGSGGAIRTRGSLPNPAVPAANCAWSDGCPRGGVATGVPPPMTAVCRKLTWSWEAGRRHVGFHLDKPQKDSSSEGLANLRPDVCQLSEAGGAGIPSPVADERPG

SEQ ID NO: 4657 - protein, 146 aa, Homo sapiens
LVPVSPLGATEGSRGSGRGGGGGGSGGAIRTRGSLPNPAVPAANCAWSDGCPRGGVATGVPPPMTAVCRKLTWSWEAGRRHVGFHLDKPQKDSSSEGLANLRPVGVGLEVVAHEHPEENHHNHLQEQAEKHGDHWPPSEIRRNSQT

SEQ ID NO: 4658 - protein, 177 aa, Homo sapiens
LVPVSPLGATEGSRGSGRGGGGGGSGGAIRTRGSLPNPAVPAANCAWSDGCPRGGVATGVPPPMTAVCRKLTWSWEAGRRHVGFHLDKPQKDSSSEGLANLRPVGVGLEVVAHEHPEENHHNHLQEQAGERQPPAERNTGIIGLPVRSEGIPRPKSSSSTSSSSAIIICIIICPFFF

SEQ ID NO: 4659 - protein, 131 aa, Homo sapiens
VSPLGATEGSRGSGRGGGGGGSGGAIRTRGSLPNPAVPAANCAWSDGCPRGGVATGVPPPMTAVCRKLTWSWEAGRRHVGFHLDKPQKDSSSEGLANLRPDLQGPAAEMGHRPYQKRGWPATQKPLGTPWG

SEQ ID NO: 4660 - protein, 122 aa, Homo sapiens
VSPLGATEGSRGSGRGGGGGGSGGAIRTRGSLPNPAVPAANCAWSDGCPRGGVATGVPPPMTAVCRKLTWSWEAGRRHVGFHLDKPQKDSSSEGLANLRPVPGTIEKHVPLEILQRKIGNQG

SEQ ID NO: 4661 - protein, 159 aa, Homo sapiens
LGPRTRRPPPPGSRAVEVPDEATIFPAPPPSPAPLPGPPLSLSLPPKPLPLRRTGASREERGLCLETRDARGAPASGGPPGLGTPRLGGVRASFPRFFPPRLVPFPPAPSADLSRRPLPSHRPTQDPGLVTGQCDASRLPRGQRGTHRAWAAPEATRPG

SEQ ID NO: 4662 - protein, 116 aa, Homo sapiens
VHRQVPSCQQLLQKPMFFFSPILRHSQNWSERGVKWDTSFKVGKPKKGASTSSLCSFSPAFFGRIRGTGAALGKVCPTRVSQLVARRGGGEGGSSSEPVTARMIEPASRLPRSPRT

SEQ ID NO: 4663 - protein, 73 aa, Homo sapiens
LVFRLSPRCIRDLWTGQDSEATPPAHSPGPTNPACPQPSHLPLPGPSHRPPPLGRRAWCERPSAEAGIMGAVP

SEQ ID NO: 4664 - protein, 71 aa, Homo sapiens
LGCLNGFGMEQGREWLRLPPRFGDAVRAASGALETSESLRVGWDSGPASHLPADWSAPRASVTQPASKTSL

SEQ ID NO: 4665 - protein, 12 aa, Homo sapiens
MYGPMYLRHLLM

SEQ ID NO: 4666 - protein, 16 aa, Homo sapiens
RRPTRRRLCCSHVYCV

SEQ ID NO: 4667 - protein, 11 aa, Homo sapiens
RCQASPKSAAG

SEQ ID NO: 4668 - protein, 27 aa, Homo sapiens
VRQSGGKPCLAVVDSCSWGVRSRSSPA

SEQ ID NO: 4669 - protein, 8 aa, Homo sapiens
ILLPQTPE

SEQ ID NO: 4670 - protein, 47 aa, Homo sapiens
RAGKRREHPGTRARARIWWRQPWRLHECRCWVWKLWVRRQLGDSRLQ

SEQ ID NO: 4671 - protein, 27 aa, Homo sapiens
RLHECRCWVWKLWVRRQLGDSRLQLQW

SEQ ID NO: 4672 - protein, 148 aa, Homo sapiens
LGRAGGHTAWLSCSWSPASPRRPGGSISQEARSPPGGWAQPRQMDEKTKKAEEMALSLTRAVAGGDEQVAMKCAIWLAEQRVPLSVQLKPEVSPTQDIRFLMVQNGHSSSIQPSHHRRKGRKTPLHTLLKSIAQKLYTLLPLIPVDQN

SEQ ID NO: 4673 - protein, 41 aa, Homo sapiens
LEAPLEPAWLASPAEEPLGPHLPPRPLPVPGPSAAWRAGRR

SEQ ID NO: 4674 - protein, 18 aa, Homo sapiens
IISHRKPSFYSFAIFSRQ

SEQ ID NO: 4675 - protein, 9 aa, Homo sapiens
VCSTSQTAL

SEQ ID NO: 4676 - protein, 19 aa, Homo sapiens
MICNRTCSYFWKLQSWKGS

SEQ ID NO: 4677 - protein, 51 aa, Homo sapiens
MAPVCDVPRNLALRKKQSKPGKYVALNRSNQGQKGRKRVSYLHGTTLTSSA

SEQ ID NO: 4678 - protein, 27 aa, Homo sapiens
LGGSAARSVGACSRAVWRTKLHKRCLR

SEQ ID NO: 4679 - protein, 25 aa, Homo sapiens
TGEERDRKHNWMCKPVVLQEVNTWN

SEQ ID NO: 4680 - protein, 235 aa, Homo sapiens
TRDRLPGRLSRGRGAGGMALVPYEETTEFGLQKFHKPLATFSFANHTIQIRQDWRHLGVAAVVWDAAIVLSTYLEMGAVELRGRSAVELGAGTGLVGIVAALLGAHVTITDRKVALEFLKSNVQANLPPHIQTKTVVKELTWGQNLGSFSPGEFDLILGADIIYLEETFTDLLQTLEHLCSNHSVILLACRIRYERDNNFLAMLERQFTVRKVHYDPEKDVHIYEAQKRNQKEDL

SEQ ID NO: 4681 - protein, 30 aa, Homo sapiens
MSFHPKGSTPIWQLTSPQAHPMDSMPHQVT

SEQ ID NO: 4682 - protein, 12 aa, Homo sapiens
IPLQQSRTEQIE

SEQ ID NO: 4683 - protein, 32 aa, Homo sapiens
KEPRTLKLIVPMKSAVPQMSCTTPIWTHLAAL

SEQ ID NO: 4684 - protein, 21 aa, Homo sapiens
LAPSPRPRRAGLRGQGPSGEG

SEQ ID NO: 4685 - protein, 20 aa, Homo sapiens
RKPAVLEARGPQRPALHLLP

SEQ ID NO: 4686 - protein, 13 aa, Homo sapiens
IHHGDWHFHFHLC

SEQ ID NO: 4687 - protein, 17 aa, Homo sapiens
ITLQLRTPTAEAALGRG

SEQ ID NO: 4688 - protein, 53 aa, Homo sapiens
LPGTSDPSGPSCVDYHCFSLRLSYVLEEGFADPRRPSGSNCHLDAGDAELPTG

SEQ ID NO: 4689 - protein, 21 aa, Homo sapiens
LPPAMMWRKTTAVSNLVSRAW

SEQ ID NO: 4690 - protein, 146 aa, Homo sapiens
TGVFPASGARRGARCGRTVRGGGRGGRSAGCRREEALHQGPRRHSFNHIRASAGNACWRLSPVPSILKGKKALPTHSPAPRSWSRRSRAHGVQPVADPVPRAVGEMDVVCGTRRGRRRGRGWRARGRPRGGGFASRDQILEFQLGF

SEQ ID NO: 4691 - protein, 146 aa, Homo sapiens
TGVFPASGARRGARCGRTVRGGGRGGRSAGCRREEALHQGPRRHSFNHIRASAGNACWRLSPVPSILKGKKALPTHSPAPRSWSRRSRAHGVQPVADPVPRAVGEMDVVCGTRRGRRRGRGWRARGRPRGGGFASRDQILEFQEWL

SEQ ID NO: 4692 - protein, 15 aa, Homo sapiens
LRKEPDYKDIYLLLP

SEQ ID NO: 4693 - protein, 34 aa, Homo sapiens
RSPITRIFTCSYPDLGTRMGRPPVAMSPPRCSWG

SEQ ID NO: 4694 - protein, 17 aa, Homo sapiens
LSKGEVAALCSVSWPRR

SEQ ID NO: 4695 - protein, 12 aa, Homo sapiens
RRKTLEPRQRGA

SEQ ID NO: 4696 - protein, 62 aa, Homo sapiens
ISPVPFPLLLILIKKKNNSNCKLATIPYVPHSWHHEGGRRSQADSHHHQDGKSRSGAFPLPG

SEQ ID NO: 4697 - protein, 37 aa, Homo sapiens
KIAPARQTEKKTNNFSFVCGVTFHWPPLPPLLSRFKC

SEQ ID NO: 4698 - protein, 30 aa, Homo sapiens
RLQKRWKKGHVHSAPKMSNIMSYTLHNQRI

SEQ ID NO: 4699 - protein, 67 aa, Homo sapiens
MQERKKRGWYPGSSRCNFREVLVCLVRELRGPGIVFKVVLLPTCPVVPAPVLTATLPFFHPRVGSTK

SEQ ID NO: 4700 - protein, 37 aa, Homo sapiens
TCSPLWPSPRTPTGTKPKTRWAVRASSQPTTSRSGRA

SEQ ID NO: 4701 - protein, 68 aa, Homo sapiens
VVVYSSVELRAPWTSQVFRVFHLELYKVQKTCLEDMTPGPLYFLQKVAYTKLNMPWKLLDMQAPVWEF

SEQ ID NO: 4702 - protein, 78 aa, Homo sapiens
VVVYSSVELRAPWTSQVFRVFHLELYKVQKTCLEDMTPGPLYFLQKQRDATSTSFLMKSFFLKKFINSMRTWLAVWQA

SEQ ID NO: 4703 - protein, 515 aa, Homo sapiens
VARSGPSAASALVLSHDSHSVLHSPRVRVPRAAVERRLPAVPRGRGAMAARGSGPRALRLLLLVQLVAGRCGLAGAAGGAQRGLSEPSSIAKHEDSLLKDLFQDYERWVRPVEHLNDKIKIKFGLAISQLVDVDEKNQLMTTNVWLKQEWIDVKLRWNPDDYGGIKVIRVPSDSVWTPDIVLFDNADGRFEGTSTKTVIRYNGTVTWTPPANYKSSCTIDVTFFPFDLQNCSMKFGSWTYDGSQVDIILEDQDVDKRDFFDNGEWEIVSATGSKGNRTDSCCWYPYVTYSFVIKRLPLFYTLFLIIPCIGLSFLTVLVFYLPSNEGEKICLCTSVLVSLTVFLLVIEEIIPSSSKVIPLIGEYLVFTMIFVTLSIMVTVFAINIHHRSSSTHNAMAPLVRKIFLHTLPKLLCMRSHVDRYFTQKEETESGSGPKSSRNTLEAALDSIRYITRHIMKENDVREVVEDWKFIAQVLDRMFLWTFLFVSIVGSLGLFVPVIYKWANILIPVHIGNANK

SEQ ID NO: 4704 - protein, 47 aa, Homo sapiens
IGLQPITVSFCPQKRRQQPLPNVESKKCEPRNSETDLNYLPRLRTRA

SEQ ID NO: 4705 - protein, 16 aa, Homo sapiens
VSAFELWRLGSGWRFF

SEQ ID NO: 4706 - protein, 28 aa, Homo sapiens
RRSISSPCLLRNQRSLISSWGPLSRMRF

SEQ ID NO: 4707 - protein, 20 aa, Homo sapiens
LWVWASSCTVSARNGKLPSP

SEQ ID NO: 4708 - protein, 84 aa, Homo sapiens
ILKNYTEGDNNVITKSTTHTACVLVYWFLCDNHRDTDHPFRHGPTAAGGFPYRDEGRLRHRLPFPSVLWSLGGHEQPREWGLAV

SEQ ID NO: 4709 - protein, 54 aa, Homo sapiens
LVSPRYGSSASAVRPLGLLADRCPSRTTHCMQRKTVPNKQSVLFFVPARTETGE

SEQ ID NO: 4710 - protein, 49 aa, Homo sapiens
VSGPRALGGSAARSVGACSRAVWRAWRTGQPPNLQAHRLDAVDKRGESD

SEQ ID NO: 4711 - protein, 36 aa, Homo sapiens
MGQIWRKRRLWPWGLVLEGISVMGMRRASLERGPSP

SEQ ID NO: 4712 - protein, 34 aa, Homo sapiens
LRTPLAARARSAARPHRYFCCAVQGTLLAQDSQC

SEQ ID NO: 4713 - protein, 22 aa, Homo sapiens
LPGPGAQRGRTGIFAVLCKELC

SEQ ID NO: 4714 - protein, 22 aa, Homo sapiens
KNLSSSTHGITRLMCTMHLYDH

SEQ ID NO: 4715 - protein, 21 aa, Homo sapiens
LQGEERGRLRRIPFPPEITQC

SEQ ID NO: 4716 - protein, 81 aa, Homo sapiens
ILPAPVPAAARSRGQRPSGGHRGARWKRRGENTPSAVTTLTPLTVMRHLHPHQDAPNCPAAPSRAGPDRTKRSPPRFSGQT

SEQ ID NO: 4717 - protein, 47 aa, Homo sapiens
TLAAGLPGAVPPGFTVRDFLRGTSGSKPRWSMSGNLTSKGFSKSCSC

SEQ ID NO: 4718 - protein, 16 aa, Homo sapiens
VFFLLRLQNCRDVFDF

SEQ ID NO: 4719 - protein, 20 aa, Homo sapiens
MERVTQPAIRVTNPSTRVHS

SEQ ID NO: 4720 - protein, 42 aa, Homo sapiens
KQCSRTQGASVRHMEVMVFLREKITEETSALMALQSWQYYNP

SEQ ID NO: 4721 - protein, 47 aa, Homo sapiens
IATPSVDMPLRLLRTLTSSWLPCLLPFPVSIFLYFLSFYYHHAMPLE

SEQ ID NO: 4722 - protein, 43 aa, Homo sapiens
RRRKRTQSSPASAFVHIAPSFNISPPTEDIIWDQADEPLKHSR

SEQ ID NO: 4723 - protein, 19 aa, Homo sapiens
RRRKRTQSSPASAAVCFRK

SEQ ID NO: 4724 - protein, 35 aa, Homo sapiens
VGPLGGGSASESDPTGFLHDSRHRLSRRFCDSGKG

SEQ ID NO: 4725 - protein, 11 aa, Homo sapiens
MTRSLINSWGV

SEQ ID NO: 4726 - protein, 32 aa, Homo sapiens
LRPHREGRRPRRTQRRLPAGGSAPPGPPTALV

SEQ ID NO: 4727 - protein, 67 aa, Homo sapiens
VRRTPGGPTGRVGPGLARRVCEDRGPVLPGRRASGGEGPGPARPVREDWGPGPAPPPPPPPRWPSSR

SEQ ID NO: 4728 - protein, 114 aa, Homo sapiens
IPTCERPLAPKKKKKKKKKEKKRHKKVETFPCPFHQVLKNQNGFREKLSDSSDQQDRTWRSESAWGGFCEWTATPGCSPPEDSGTCSSRCQALRHLQAASGQPWLCQQNSWQVL

SEQ ID NO: 4729 - protein, 93 aa, Homo sapiens
RLLLFSHLLPEPGELLGDASGVRAGHEQRLPVLGLGPAILDPLTGLPRWWIRIFTSFKGRLTLWLGPSNEMPDGAPIHHWMKNGILCCIVSVI

SEQ ID NO: 4730 - protein, 8 aa, Homo sapiens
ISFTFTAS

SEQ ID NO: 4731 - protein, 31 aa, Homo sapiens
VGPARVCVCVRVCVRARWRGGTNCFTLSTLH

SEQ ID NO: 4732 - protein, 79 aa, Homo sapiens
IIRKHVHLLTIIEWNSRKSVSVDAALWSEVFHRDFVKKNFIVSWEFSSKQNYGKKGRNSRKICTVGFYCHELEASQVDQ

SEQ ID NO: 4733 - protein, 31 aa, Homo sapiens
KTGVWRLAGLGTAELADFRSGPLLTAEGKAG

SEQ ID NO: 4734 - protein, 27 aa, Homo sapiens
LLRLQMKDAPGTPSQQLLQHERYAWFS

SEQ ID NO: 4735 - protein, 31 aa, Homo sapiens
LLPSWAPLPQATRRDAPAAQHRFLSGSWALL

SEQ ID NO: 4736 - protein, 27 aa, Homo sapiens
LWVWASSCTVSVSGSLDEARNGKLPSP

SEQ ID NO: 4737 - protein, 24 aa, Homo sapiens
VVLPPGLTSLWFVCLCSASSGAAC

SEQ ID NO: 4738 - protein, 62 aa, Homo sapiens
LQLPWALCGLDAELGRRGRAITPIHCQWNYSYSGSVYRIAFSRLPGDAQSQYILRKRNIKEI

SEQ ID NO: 4739 - protein, 15 aa, Homo sapiens
TFLKYATCSPTRCST

SEQ ID NO: 4740 - protein, 48 aa, Homo sapiens
KPLPDRRPCRRRRLRALYWDGVRGPAAREKRAAPQTGPGPAPAPASST

SEQ ID NO: 4741 - protein, 15 aa, Homo sapiens
VAHACNPSTLRGQGG

SEQ ID NO: 4742 - protein, 11 aa, Homo sapiens
VNISKMNQEYV

SEQ ID NO: 4743 - protein, 12 aa, Homo sapiens
TGNRPWERYVVG

SEQ ID NO: 4744 - protein, 12 aa, Homo sapiens
LGAQVLLQSCKV

SEQ ID NO: 4745 - protein, 32 aa, Homo sapiens
LCQLVPLRSKSYSGCHAATRSSPFIPTPRRWL

SEQ ID NO: 4746 - protein, 77 aa, Homo sapiens
IGSSRCLFHHQMPWRPWSVPWAWPSAWWASSWAPSSSSWAHMCPVSPGNDPSERNDLWETPCRSSWVCDSPCVLSAL

SEQ ID NO: 4747 - protein, 38 aa, Homo sapiens
KVTKYLNRRGLRRDLNSSCPTNSISAFLLTSCENYSSG

SEQ ID NO: 4748 - protein, 26 aa, Homo sapiens
LGTGEALIADRGCCHLCLLPAESHKP

SEQ ID NO: 4749 - protein, 11 aa, Homo sapiens
MKPCGAARVPA

SEQ ID NO: 4750 - protein, 100 aa, Homo sapiens
RRKSCGACRALSLQLPQGGGGQHHPHPGGLPKTGACLLPLSQHLRELHYSPGLHPHPADHPRESETWQPQLQSHPLVRALSCVHVTECLFETGRDEDKYG

SEQ ID NO: 4751 - protein, 23 aa, Homo sapiens
MSQKEERICEMPGKPSCSPGKSK

SEQ ID NO: 4752 - protein, 12 aa, Homo sapiens
KHHRLTNNHAQE

SEQ ID NO: 4753 - protein, 40 aa, Homo sapiens
RRGAPGTGVWDSRQERLRLPRTGTFATHQILAPGSRERTG

SEQ ID NO: 4754 - protein, 13 aa, Homo sapiens
VRTSLMCGQQQTT

SEQ ID NO: 4755 - protein, 30 aa, Homo sapiens
RRRPGRRRRRRPARIRCSQVPCSSLQKKNH

SEQ ID NO: 4756 - protein, 19 aa, Homo sapiens
LFGSTNRKQTNKKQLPKTS

SEQ ID NO: 4757 - protein, 42 aa, Homo sapiens
TRHAVRLRGCATKTSPGAAPRPPHPALARPKTGAKLPRRLPS

SEQ ID NO: 4758 - protein, 15 aa, Homo sapiens
KMRGAGRNNLGTLKG

SEQ ID NO: 4759 - protein, 12 aa, Homo sapiens
MFTTTSDRTRNH

SEQ ID NO: 4760 - protein, 10 aa, Homo sapiens
IGTWYSSGIT

SEQ ID NO: 4761 - protein, 25 aa, Homo sapiens
VDEEEPETPRRRPDRRRTVPGRAGG

SEQ ID NO: 4762 - protein, 15 aa, Homo sapiens
LLPQATGFPTPWLLM

SEQ ID NO: 4763 - protein, 24 aa, Homo sapiens
LGGSAARSVGACSRAVWRRLGIVK

SEQ ID NO: 4764 - protein, 43 aa, Homo sapiens
TQNHCGHLWRLGCSWRRCLFRKGLYQGRPFSCLCCSLGGKIPC

SEQ ID NO: 4765 - protein, 16 aa, Homo sapiens
VPRAPLGRPWVAVPCL

SEQ ID NO: 4766 - protein, 36 aa, Homo sapiens
LFLQPCGAASCPQPSLATVRRRSLYRRPNLPWKRQL

SEQ ID NO: 4767 - protein, 38 aa, Homo sapiens
LSGSFKCVEQGRGMMRKTFFFFFLETPKEACLCAAAVL

SEQ ID NO: 4768 - protein, 19 aa, Homo sapiens
RRGFWADSGQEASCLALWG

SEQ ID NO: 4769 - protein, 21 aa, Homo sapiens
LGFREGFGLRRGALFCSVLFF

SEQ ID NO: 4770 - protein, 21 aa, Homo sapiens
IASVACAVTRTGRGSHLKGKK

SEQ ID NO: 4771 - protein, 31 aa, Homo sapiens
IASVACAVTRTGRGSHLKGKKWIQWPLRMWL

SEQ ID NO: 4772 - protein, 17 aa, Homo sapiens
MTLKLFGRPSPDLWAYL

SEQ ID NO: 4773 - protein, 9 aa, Homo sapiens
IPKEERADR

SEQ ID NO: 4774 - protein, 27 aa, Homo sapiens
ISRHFRSLFHRRPTRRRLCCSHVSSDP

SEQ ID NO: 4775 - protein, 29 aa, Homo sapiens
RGAAGAVGGAGGAGVLGPGDTEVQAPGTG

SEQ ID NO: 4776 - protein, 14 aa, Homo sapiens
IETKKHRRHKHVTY

SEQ ID NO: 4777 - protein, 36 aa, Homo sapiens
KWKEEGKGGGVGWGPDETSGLVSRMKDRLAAEELCS

SEQ ID NO: 4778 - protein, 27 aa, Homo sapiens
KEKYMQLKPLVVQEKVLFMMIWNVHIT

SEQ ID NO: 4779 - protein, 66 aa, Homo sapiens [sequence omitted]

SEQ ID NO: 4780 - protein, 24 aa, Homo sapiens
LQLMLEEKARVSDCMYHLHGSRNV

SEQ ID NO: 4781 - protein, 57 aa, Homo sapiens
VVVYSSVELRAPWTSQVFRVFHLELYKVQKTCLEDMTPGPLYFLQKGHGLQCGRHNF

SEQ ID NO: 4782 - protein, 21 aa, Homo sapiens
RSLASKIMASRFTSIETRPER

SEQ ID NO: 4783 - protein, 30 aa, Homo sapiens
TEGPSGGTEKKEGAISLRLRLQGRFGRGQA

SEQ ID NO: 4784 - protein, 15 aa, Homo sapiens
IPGSARAHLQPGEHS

SEQ ID NO: 4785 - protein, 17 aa, Homo sapiens
MEIRSRWHLCTGMGEPC

SEQ ID NO: 4786 - protein, 248 aa, Homo sapiens
TAGLSRGRGAGGMALVPYEETTEFGLQKFHKPLATFSFANHTIQIRQDWRHLGVAAVVWDAAIVLSTYLEMGAVELRGRSAVELGAGTGLVGIVAALLALKSSMKPLLVHCLLFFSGAHVTITDRKVALEFLKSNVQANLPPHIQTKTVVKELTWGQNLGSFSPGEFDLILGADIIYLEETFTDLLQTLEHLCSNHSVILLACRIRYERDNNFLAMLERQFTVRKVHYDPEKDVHIYEAQKRNQKEDL

SEQ ID NO: 4787 - protein, 24 aa, Homo sapiens
RLLFKEDRKRQGYLLVCEETKVKL

SEQ ID NO: 4788 - protein, 68 aa, Homo sapiens
MDASLFRDSRSWNLHPFGFAIFTHPEPSGLHGDASKQQIPGGNDVISPFPAAQALERSKACGPRLRLS

SEQ ID NO: 4789 - protein, 158 aa, Homo sapiens
VLADASCWEPATPATPCAGTKLSVAVAGTHRVWVAASQQPRAAPPARLPAWALCPPGNENMDASLFRDSRSWNLHPFGFAIFTHPEPSGLHGDASKQQIPGGNDVISPFPAAQALEVLLPGAGGGGGGAAGLPWPPPIPTWCSPNQRSKACGPRLRLS

SEQ ID NO: 4790 - protein, 27 aa, Homo sapiens
KLFLQGYYVIPVVQVVVLALLDFFFFL

SEQ ID NO: 4791 - protein, 185 aa, Homo sapiens
LPIWAEGWFLPSTKPSQDLPASPRPTRSSAVPWCPSRPQVLHAGYLWAPRLAEPGVQPGRAPWQQSLACGCCPGPWMVSRPPRTPLSPSSWTPAMGLRASRNCSRTENAVCGCSPGHFCIVQDGDHCAACRAYATSSPGQRVQKGGTESQDTLCQNCPPGTFSPNGTLEECQHQTNRAWKSQTDL

SEQ ID NO: 4792 - protein, 275 aa, Homo sapiens
LPIWAEGWFLPSTKPSQDLPASPRPTRSSAVPWCPSRPQVLHAGYLWAPRLAEPGVQPGRAPWQQSLACGCCPGPWMVSRPPRTPLSPSSWTPAMGLRASRNCSRTENAVCGCSPGHFCIVQDGDHCAACRAYATSSPGQRVQKGGTESQDTLCQNCPPGTFSPNGTLEECQHQTKCSWLVTKAGAGTSSSHWVWWFLSGSLVIVIVCSTVGLIICVKRRKPRGDVVKVIVSVQRKRQEAEGEATVIEALQAPPDVTTVAVEETIPSFTGRSPNH

SEQ ID NO: 4793 - protein, 16 aa, Homo sapiens
TTLVPVVIAKRWCATH

SEQ ID NO: 4794 - protein, 18 aa, Homo sapiens
MVAVKAVAATMMEKRNLH

SEQ ID NO: 4795 - protein, 33 aa, Homo sapiens
IQRSTNPPSIMVSRGYRRSFLGTLVTLSVCQRK

SEQ ID NO: 4796 - protein, 31 aa, Homo sapiens
LGPSSSSRDCAKAMQQNAGGLCKAHGGDGVS

SEQ ID NO: 4797 - protein, 19 aa, Homo sapiens
LVLASLGLWWPLHQTSLCL

SEQ ID NO: 4798 - protein, 179 aa, Homo sapiens
LHLGPASVAMDRGPWSSLILRGCLHGTRTDSNTGSSFPLPDISRRQHPCMPSVYNPSLKKDTENKLLRKPYIELQSARGGTGASHTSGRRLQPPGGPRVVGVAGGTTALRADTRGTKRCLDKGWCPAQGAQRGHAMADKAQDVKNSPWTPRQKPRTVCRQISTQHPSWLPVPRTLYLFF

SEQ ID NO: 4799 - protein, 20 aa, Homo sapiens
IFRQLMKRSARGGHWRRSVT

SEQ ID NO: 4800 - protein, 28 aa, Homo sapiens
KRAVSANPASLCGGLCHRAMGPEVPGPG

SEQ ID NO: 4801 - protein, 8 aa, Homo sapiens
LNTLYLRN

SEQ ID NO: 4802 - protein, 28 aa, Homo sapiens
MPTGMYATFQKIGVDNSLQYCTVVKEEC

SEQ ID NO: 4803 - protein, 28 aa, Homo sapiens
RAESCSIESKMFRPCCLRSSDAHSIPYR

SEQ ID NO: 4804 - protein, 57 aa, Homo sapiens
MCLPPALHTSLSPQPGNPCPPPAGRTAPGAPCQPLPRLGDGRRDRIRAAPTEWDPRG

SEQ ID NO: 4805 - protein, 17 aa, Homo sapiens
MWKELKCSNLKMAPASQ

SEQ ID NO: 4806 - protein, 38 aa, Homo sapiens
MRSPLSASALLLWSSSVARAFSSPSLLMAVPSPTCSRY

SEQ ID NO: 4807 - protein, 501 aa, Homo sapiens
LAADLDVVSRTGGRWQTSRLGVGAPGLPCHILPALSSGRWTVPAPAPSLWRDIVGRGSGPGLGGPRESAASGPPPQRRPARPLELAWPGVALPRPTGPLASDGFVFPGPAGRGALAALAPAAVLSLSLQTGGPRRAESPGGSCGRGRRGLEWVVAPSWDAPPSTISPGLQGPRAYTASSHAVLRNPCWPQNTSALPPVQPCLAGGPSSTAMVWKKLGSRNFSSCPSGSIQWIWDVLGECAQDGWDEASVGLGLISILCFAASTFPQFIKAYKTGNMDQALSLWFLLGWIGGDSCNLIGSFLADQLPLQTYTAVYYVLADLVMLTLYFYYKFRTRPSLLSAPINSVLLFLMGMACATPLLSAAGPVAAPREAFRGRALLSVESGSKPFTRQEVIGFVIGSISSVLYLLSRLPQIRTNFLRKSTQGISYSLFALVMLGNTLYGLSVLLKNPEEGQSEGSYLLHHLPWLVGSLGVLLLDTIISIQFLVYRRSTAASELEPLLPS

SEQ ID NO: 4808 - protein, 38 aa, Homo sapiens
LYWWVTWTTVAVSTLRSFTSWAPVSGPRWPSRPSSRSL

SEQ ID NO: 4809 - protein, 170 aa, Homo sapiens
RHTQGLGRAGGHTAWLSCSWSPASPRRPGGSISQEARSPPGGWAQPRQMDEKTKKAPENKPCANWLLLYWLSAEEMALSLTRAVAGGDEQVAMKCAIWLAEQRVPLSVQLKPEVSPTQDIRFLMVQNGHSSSIQPSHHRRKGRKTPLHTLLKSIAQKLYTLLPLIPVDQN

SEQ ID NO: 4810 - protein, 70 aa, Homo sapiens
ISWTVLYRTKHKKGQSEEIQKKRTRRAVKFQRAITGASLADIMAKRDQKPEVRKAQREQAIRAAKEAKKG

SEQ ID NO: 4811 - protein, 78 aa, Homo sapiens
RQQGDQVLPLTKSLLGIMKRIRTLTFLAVHFPPVKVMVQFSIHIHIRGLACCTSKKPDCCSLLRTGMQQSGRGCLILS

SEQ ID NO: 4812 - protein, 29 aa, Homo sapiens
MHSECEGHPGAPGSGPCGHRAGELGGAAL

SEQ ID NO: 4813 - protein, 22 aa, Homo sapiens
LLFPSSQLCLGRRLCGSPETFG

SEQ ID NO: 4814 - protein, 8 aa, Homo sapiens
TGRSACVL

SEQ ID NO: 4815 - protein, 91 aa, Homo sapiens
ISPVPFPLLLILIKKKNNSNCKLATIPYVPHSWHHEGGRRSQADSHHHQDGKSRSGAFPLPGYGMCRCPTINSKQQRNDVSSIKSYFQWFH

SEQ ID NO: 4816 - protein, 69 aa, Homo sapiens
ITGAKPYLGSKTSKRTQPQTHPGARGQAVCETSPGGTQACTGRYTTFLGIRSPPGRSCGSPQPQDPAGV

SEQ ID NO: 4817 - protein, 17 aa, Homo sapiens
RPRSSSPDQSPRSGPRP

SEQ ID NO: 4818 - protein, 14 aa, Homo sapiens
IQWAGADHPRGQQH

SEQ ID NO: 4819 - protein, 81 aa, Homo sapiens
LYKVLVCVLPLCLLSSFLSLWLASLEALGRCPCCASVCFMFSGEVIMPFFLSSYFRYPIECFLLPGRVRKLCVSGDHGYHS

SEQ ID NO: 4820 - protein, 146 aa, Homo sapiens
LRRKQLVAGDIVLDKLGERLAILLKVRDMVSSHVERVFQIYEQHADTVGIDAVLQPSAVSPSVADMLEWLQDIERHYRKSKVPEEKVSSFVYPVGRLGKHTSFAQGLGPNFKRRTPRSCTRYPIECFLLPGRVRKLCVSGDHGYHS

SEQ ID NO: 4821 - protein, 88 aa, Homo sapiens
LNLRFLGFPMPPGGICEPLGIAPPHLPPAGGTVAISITWTGLPCGAPVFLSPGALPALAELWCSLMRNVGTQARWAAGVASGRVGGLN

SEQ ID NO: 4822 - protein, 36 aa, Homo sapiens
VMNGNFLTFQATTSERKWNFPEAQAGGPRHKLLICM

SEQ ID NO: 4823 - protein, 39 aa, Homo sapiens
VMNGNFLTFQATTSERKWNFPEAQAGGPRHKLLIWLEME

SEQ ID NO: 4824 - protein, 337 aa, Homo sapiens
LGRACLHHRYSHPFPVLGSHIPGSTFVPCSLHPHTGPEAPHPHAPGRLIHRCPSGLTQTLQPPPRRHSLILGRSVGADGGQNPFPCFMPGPVSPPARSPTSQAPHHPSTAPVCLHAPGLAVGLDPEGYGNPDFCWLSIYDTLIWSFAGPVAFAVSMSVFLYILAARASCAAQRQGFEKKGPVSGLQPSFAVLLLLSATWLLALLSVNSDTLLFHYLFATCNCIQVPGPACGEGRHLGCGCLNMHRPLLPLACQGPFIFLSYVVLSKEVRKALKLACSRKPSPDPALTTKSTLTSSYNCPSPYADGRLYQPYGDSAGSLHSTSRSGKSQPSYIPFLLR

SEQ ID NO: 4825 - protein, 95 aa, Homo sapiens
MPGPVSPPARSPTSQAPHHPSTAPVCLHAPGLAVGLDPEGYGNPDFCWLSIYDTLIWSFAGPVAFAVSMSVFLYILAARASCAAQRQGFEKKGPV

SEQ ID NO: 4826 - protein, 312 aa, Homo sapiens
MGGWRRGGGAHACWTQASQLLGVEEHTLWLTWGPAWIRSCKGPTAGTRIPGERRDWDPGQGARLTPPAWSHLPREESALNPGQGPPGLGDPGSLFLEGQDQQHDPDTDSDSDLSLEDDQSGSYASTHSSDSEEEEEEEEEEAAFPGEQGWDSLLGPGAERLPLHSTPKDGGPGPGKAPWPGDFGTTAKESSGNGAPEERLRENGDALSREGSLGPLPGSSAQPHKGILKKKCLPTISEKSSLLRLPLEQCTGSSRGSSASEGSRGGPPPRPPPRQSLQEQLNGVMPIAMSIKAGTVDEDSSGSEFLFFNFLH

SEQ ID NO: 4827 - protein, 110 aa, Homo sapiens
LSNLLWPLRHVLFLTPSWNWLSSSKDQVLFLFLPDSTPAPCEERVNIFVLFICFLCWDGFVSSPGGLIWPSQAGCSQQPWLGGLTPFPLPQAIISPPLLPSPQFCRLLFI

SEQ ID NO: 4828 - protein, 462 aa, Homo sapiens
LRRKGLGGEGAGERIPWEQSLCLLLCELCRSLLSFPSLCPLLIALQGVCPGALLFELGRFKDAPTLTPQQSHSPGIPFGPSRSRASSESELDDEGPCGGDGDPGLFPFPMPRGGTQASSEESEEEGTSDDLHPPPDCHYATRPPRPQAFCTFGSRLVSPGCYVFSRRLDRFCSALSSMLERHLSTHMWKKIPPAAEPPAHLVNSPLSAPLSPSSTGTCPRLPGPTLRPACPASMPPTKDNLVPSYPAGSPSVAAACSQAECMGGSQAITSPLPANTPSPSFSKLPPSKASKSSKGKDGVEVEAPSRKRKLSPGPTTLKRTCILEPTGKGKPSGCRGLSAKTKTALSMGLNGTMGPRVKRAGPLDCRGSPHQLPTPVKASQLENRGAAGHPAKALPTNCLSEEEVAKKRKNLATYCRPVKAKHCQAGAPADVACSVRRKKPGPALAFEEKCSTLKVPARLPED

SEQ ID NO: 4829 - protein, 458 aa, Homo sapiens
LRRKGLGGEGAGERIPWEQSLCLLLCELCRSLLSFPSLCPLLIALQGVCPGALLFELGRFKDAPTLTPQQSHSPGIPFGPSRSRASSESELDDEGPCGGDGDPGLFPFPMPRGGTQASSEESEEEGTSDDLHPPPDCHYATRPPRPQAFCTFGSRLVSPGCYVFSRRLDRFCSALSSMLERHLSTHMWKKIPPAAEPPAHLVNSPLSAPLSPSSTGTCPRLPGPTLRPACPASMPPTKDNLVPSYPAGSPSVAAACSQAECMGGSQAITSPLPANTPSPSFSKLPPSKASKSSKGKDGVEVEAPSRKRKLSPGPTTLKRTCILEPTGKGKPSGCRGLSAKTKTALSMGLNGTMGPRVKRAGPLDCRGSPHQLPTPVKASQLENRGAAGHPAKALPTNCLSEEEVAKKRKNLATYCRPVKAKHCQAGAPADVACSVRRKKPGPALAFEEKCSTLKSKAH

SEQ ID NO: 4830 - protein, 117 aa, Homo sapiens
MGKDEREGNSPSFFNPEEAATVTSYLKLLLAPSSKKGKARLSPRSVGVISPYRKQVEKIRYCITKLDRELRGLDDIKDLKNTLQAPALSRIQPSCFSFHSLPPIPFPWAVSQHWFTH

SEQ ID NO: 4831 - protein, 14 aa, Homo sapiens
MAQEGHSTGLDKRP

SEQ ID NO: 4832 - protein, 71 aa, Homo sapiens
LEENLRSSSWDRGMRALNHEWHRSQKLVSLYKDSATTQLSDHRESSLMMGDAPSVFSCDLLHRSVPPRIWR

SEQ ID NO: 4833 - protein, 60 aa, Homo sapiens
LGGTSSLDPVDDKTQTGSAKDASHCHASLSQGCAAFGFTEEPCGRFYARGKSACSSCSAG

SEQ ID NO: 4834 - protein, 73 aa, Homo sapiens
VETSKQQKEARMKTVNSPLSTRPKEGGPACCGVATPGLGWAGPVEGTQELQVLRFPSMKLTGIRADFCLSVSR

SEQ ID NO: 4835 - protein, 153 aa, Homo sapiens
LGRECLVPAAPSPGPEGRAGRAASYPLLLLPISSPPRCEPEPPPPLPPLTHAAPGLAQRRVWDRVRGWKSLVESGRAGAIWRPCSEWASAPRGHWSELSSRSSSTPAGERRPLAKAVGTELLAWPQGKGLRTCGKVIPFPDPCQPGFLSGRGE

SEQ ID NO: 4836 - protein, 139 aa, Homo sapiens
LTYPQLPLPHVTLTYTLWGPPVLRLCLLAFVLTLEPPVPCGRLDRLEPIIVDITKHTFYKQPMFYHLGHFSKFIPEGSQRVGLVASQKNDPDAVALMHPDGSLNRSSKDVPLTIKDPAVGFLETISPGYSIHTYLWRRQ

SEQ ID NO: 4837 - protein, 341 aa, Homo sapiens
LLTATDSGSERPALHPGIGYNIIWVPMASCDFSIRTYTYADTPDDFQLHNFSLPEEDTKLKIPLIHRALQLAQRPVSLLASPWTSPTRLKTRGAGNGKGPLKGQPRDIYHQTWARYIVKFLDAYAEHKLQFWAVTAENEPSAGLLSGYPFQCLGFTPEHQRDFIARDLGPTLANGTHHNVRLLMLDDQRLLLPHWAKVVLTDPEAAKGLCGFQVLGAECAARLLGSRDAVQPQHHHKPPVPCGRLDRLEPIIVDITKHTFYKQPMFYHLGHFSKFIPEGSQRVGLVASQKNDPDAVALMHPDGSLNRSSKDVPLTIKDPAVGFLETISPGYSIHTYLWRRQ

SEQ ID NO: 4838 - protein, 354 aa, Homo sapiens
MCLQPLQEQKQWALDGAEYRTIQANCTGTGIGYNIIWVPMASCDFSIRTYTYADTPDDFQLHNFSLPEEDTKLKIPLIHRALQLAQRPVSLLASPWTSPTRLKTRGAGNGKGPLKGQPRDIYHQTWARYIVKFLDAYAEHKLQFWAVTAENEPSAGLLSGYPFQCLGFTPEHQRDFIARDLGPTLANGTHHNVRLLMLDDQRLLLPHWAKVVLTDPEAAKGLCGFQVLGAECAARLLGSRDAVQPQHHHKPPVPCGRLDRLEPIIVDITKHTFYKQPMFYHLGHFSKFIPEGSQRVGLVASQKNDPDAVALMHPDGSLNRSSKDVPLTIKDPAVGFLETISPGYSIHTYLWRRQ

SEQ ID NO: 4839 - protein, 289 aa, Homo sapiens
LLTATDSGSERPALHPGIGYNIIWVPMASCDFSIRTYTYADTPDDFQLHNFSLPEEDTKLKIPLIHRALQLAQRPVSLLASPWTSPTRLKTRGAGNGKGPLKGQPRDIYHQTWARYIVKFLDAYAEHKLQFWAVTAENEPSAGLLSGYPFQCLGFTPEHQRDFIARDLGPTLANGTHHNVRLLMLDDQRLLLPHWAKVVLTDPEAAKYVHGIAVHWYLDFLAPAKATLRETHHLFPNTMLFASEACVGSKFWEQSVRLGSWDRGMQYSHSIITNLLYHVVGWTDWNPSL

SEQ ID NO: 4840 - protein, 308 aa, Homo sapiens
VKGFGGAVTDAGALNILALSPPAQNLLLKWYFSEEGIGYNIIWVPMASCDFSIRTYTYADTPDDFQLHNFSLPEEDTKLKIPLIHRALQLAQRPVSLLASPWTSPTRLKTRGAGNGKGPLKGQPRDIYHQTWARYIVKFLDAYAEHKLQFWAVTAENEPSAGLLSGYPFQCLGFTPEHQRDFIARDLGPTLANGTHHNVRLLMLDDQRLLLPHWAKVVLTDPEAAKYVHGIAVHWYLDFLAPAKATLRETHHLFPNTMLFASEACVGSKFWEQSVRLGSWDRGMQYSHSIITNLLYHVVGWTDWNPSL

SEQ ID NO: 4841 - protein, 119 aa, Homo sapiens
LLTATDSGSERPALHPGIGYNIIWVPMASCDFSIRTYTYADTPDDFQLHNFSLPEEDTKLKIPLIHRALQLAQRPVSLLASPWTSPTRLKTRGAGNGKGPLKGQPRDIYHQTWARYIVK

SEQ ID NO: 4842 - protein, 32 aa, Homo sapiens
MLPWGAQLDISMEIPQEFQKTVSTMYYLWMCE

SEQ ID NO: 4843 - protein, 356 aa, Homo sapiens
VSVQEMRAENGPSEPSQKGKAQSSTLLLHIPPYCSNPRSSGTMEDKRNIQIIEWEHLDKKKFYVFGVAMTMMIRVSVYPFTLIRTRLQVQKGKSLYHGTFDAFIKILRADGITGLYRGFLVNTFTLISGQCYVTTYELTRKFVADYSQSNTVKSLVAGGSASLVAQSITVPIDVVSQHLMMQRKGEKMGRFQVRGNPEGQGVVAFGQTKDIIRQILQADGLRGFYRGYVASLLTYIPNSAVWWPFYHFYAEQLSYLCPKECPHIVFQAVSGPLAAATASILTNPMDVIRTRVQVEGKNSIILTFRQLMAEEGPWGLMKGLSARIISATPSTIVIVVGYESLKKLSLRPELVDSRHW

SEQ ID NO: 4844 - protein, 34 aa, Homo sapiens
LLGWMRRSRRRRGGDRTEDGPCREEQAGENESRL

SEQ ID NO: 4845 - protein, 59 aa, Homo sapiens
LGLQHAKGHPLSLTEKNTLLSRGLNRLLTLPEVQCIFQDFQVFDAVMLRVHYPRLFIQE

SEQ ID NO: 4846 - protein, 11 aa, Homo sapiens
LTSAKVLNDWV

SEQ ID NO: 4847 - protein, 67 aa, Homo sapiens
VMNARVTGGRKKDNWAQKKGLPRPGPCKGSAPGGRAALLVAKERSRAVPRVAARPGTPAPLRALAEQ

SEQ ID NO: 4848 - protein, 90 aa, Homo sapiens
LMKQEEHGSGIWKTWLLAATNQLCDSGKGGLSSYFCNMRTLDYLNSELRKLEGTLKPSKKEFGNVLHCCQFSSKNNLAWKLLVQWEFDSP

SEQ ID NO: 4849 - protein, 24 aa, Homo sapiens
LEPMCISASPGLAFHMLLAHISAS

SEQ ID NO: 4850 - protein, 167 aa, Homo sapiens
LSVSKPVCVSAGVGGNLVAVQASRISTFLHMNGMPGENSEQAPRRCPSPCTTFFSPDVNSRSARVLFLLVVPGHLVFLYTISCMQGGHTTLTLIFIIFYMTAALLQVLILLYIADWMVHWMWGRGLDPDNFSIPYLTALGDLLGTGLLALSFHVLWLIGDRDTDVGD

SEQ ID NO: 4851 - protein, 85 aa, Homo sapiens
LRLASPPWAVEPSAGVRIACCRFIFSVFPTATCWGKTAKALEEQENKASCPRPPGFRRTQMMLLSPPKYNVLCSQYDPIQCRSIA

SEQ ID NO: 4852 - protein, 39 aa, Homo sapiens
VDTVEEAHITCGCRDFTGNHEQVNTVLPRTEGICTVKVT

SEQ ID NO: 4853 - protein, 54 aa, Homo sapiens
LKSQLGGNQFALFDEEFGHQTTDTFPKVWQKLFFEWLTRVPRRISMELEDSGLP

SEQ ID NO: 4854 - protein, 58 aa, Homo sapiens
LIWRKKSQLGGNQFALFDEEFGHQTTDTFPKVWQKLFFEWLTRVPRRISMELEDSGLP

SEQ ID NO: 4855 - protein, 57 aa, Homo sapiens
LSLQKSQLGGNQFALFDEEFGHQTTDTFPKVWQKLFFEWLTRVPRRISMELEDSGLP

SEQ ID NO: 4856 - protein, 43 aa, Homo sapiens
LEETSLHYLMRNLATKPLILSQRFGRNCFLSGSPEYPEESVWN

SEQ ID NO: 4857 - protein, 49 aa, Homo sapiens
VGPDLGKPSPRAGRAATREARLGKCRAGSDPPQGLQTASESREGLELSL

SEQ ID NO: 4858 - protein, 57 aa, Homo sapiens
LDFSLLKSEAKRSSILQKSTGDDSGLKMIMKPLCKYQSGDEAVMNFDQKPCFVGLPL

SEQ ID NO: 4859 - protein, 98 aa, Homo sapiens
LLPNYLNGFECFVCDYELARLDAEKAHAASPGDSPVFEPHIAQPSHMDCPVPTPGFGNVEEIPENDRKEQEGRQTFRLGAVAHACDPSTLGGQGRRIA

SEQ ID NO: 4860 - protein, 761 aa, Homo sapiens
LGWLGPLGRLFSPSPFLGTVPRSLTPSTTVSSILRNPIYTVRSHRVGPCSSPPAARDAGPQGLHPSVQHQGRLSLDLSHRTCSDYSEMRATHGSNSLPSSARLGSSSNLQFKAERIKIPSTPRYPRSVVGSERGSVSHSECSTPPQSPLNIDTLSSCSQSQTSASTLPRIAVNPASLGERRKDRPYVEEPRHVKVQKGSEPLGISIVSGEKGGIYVSKVTVGSIAHQAGLEYGDQLLEFNGINLRSATEQQARLIIGQQCDTITILAQYNPHVHQLSSHSRSSSHLDPAGTHSTLQGSGTTTPEHPSVIDPLMEQDEGPSTPPAKQSSSRIAGDANKKTLEPRVVFIKKSQLELGVHLCGGNLHGVFVAEVEDDSPAKGPDGLVPGDLILEYGSLDVRNKTVEEVYVEMLKPRDGVRLKVQYRPEEFTKAKGLPGDSFYIRALYDRLADVEQELSFKKDDILYVDDTLPQGTFGSWMAWQLDENAQKIQRGQIPSKYVMDQEFSRRLSMSEVKDDNSATKTLSAAARRSFFRRKHKHKRSGSKDGKDLLALDAFSSDSIPLFEDSVSLAYQRVQKVDCTALRPVLILGPLLDVVKEMLVNEAPGKFCRCPLEVMKASQQAIERGVKDCLFVDYKRRSGHFDVTTVASIKEITEKNRHCLLDIAPHAIERLHHMHIYPIVIFIHYKSAKHIKEQRDPIYLRDKVTQRHSKEQFEAAQKLEQEYSRYFTGVIQGGALSSICTQILAMVNQEQNKVLWIPACPL

SEQ ID NO: 4861 - protein, 184 aa, Homo sapiens
LGWLGPLGRLFSPSPFLGTVPRSLTPSTTVSSILRNPIYTVRSHRVGPCSSPPAARDAGPQGLHPSVQHQGRLSLDLSHRTCSDYSEMRATHGSNSLPSSARLGSSSNLQFKAERIKIPSTPRYPRSVVGSERGSVSHSECSTPPQSPLNIDTLSSCSQSQTSASTLPRIAVNPASLGERRKDS

SEQ ID NO: 4862 - protein, 26 aa, Homo sapiens
LKLFCMEVYLEKWFLSHCLVLDKLFV

SEQ ID NO: 4863 - protein, 323 aa, Homo sapiens
MSGDEMIFDPTVSKKKKKKKKPFMLDEEADTQTEITQPSETKEVGPEPTEDKDLEADEEDTRKKDAAGDLDDLNFFNQKKKKKKTKKIFDIDEAEEGVKDLKIESDVQEPTEPENDLDIMLGNKKKKKKVKFPDEDEILEKDEVLEEEDSKKDDGISFSNQTGPAWAGSERDYTYEELLNRVFNIMREKNPGMVAGDIRKFVMKPPQVVRVGTKKTSFVNFTHICKLLHHQPKHLRAFLLAELGTSGSIDGNNQLVIKGRFQQKQIENVLRRYIKEYVTCHTCRLLDTILQKDMRIYFLQCETCHSRCSVASIKTSYQAVMGK

SEQ ID NO: 4864 - protein, 58 aa, Homo sapiens
MAPRPGTRSCAGFAGGLVARGRGAAGEAGAGADAEAGARQALEPRACSRWSRNPAGSG

SEQ ID NO: 4865 - protein, 33 aa, Homo sapiens
MPYTLAGGKAWDEQERDAYADRAQLTARTKGDA

SEQ ID NO: 4866 - protein, 100 aa, Homo sapiens
LFFQPISTEGRWWPITRMTSPLSTGSEGSAAPPAPPRLTTSSSRSWPRSTPMHMDGCSKVGTAEITSQMASPMGLPGILSARECKTLIISIPTALRSRWN

SEQ ID NO: 4867 - protein, 287 aa, Homo sapiens
LLDPDGAGGAGRRSPGHGAGVPRLAGRARAAGRGRADSGALRARRGSHSDEIPVPGQRHQPASAFLLPSQIETEGGGREVEKKATGEGGREKPRRRSGLTPGRLLLRSPEARRPRRGETPRARLRAGRAPGLCRGKQGLIKLERNFSQLLMNRRLGSRPSPPLPRPSPFAPPAPSSPLSFLLGLCWGLEGSGLRSEPACGGGARPSRHPQRPAILGSAAAAGVWARSLRAPRRPLAPDSFFFFFGGIFFFPRGGLAASNKLGEREGENAKSRFLSTSAPPTPVLSKK

SEQ ID NO: 4868 - protein, 102 aa, Homo sapiens
LVLCICTLCRWSKIVMESVLEENKGKIRLNCMYMAPLWLVTLLKSSVCQCIWIHEEKERVSEWNKEWEEVICNVTNCAITPRSNFSSALHGIVYQWRNVLFP

SEQ ID NO: 4869 - protein, 48 aa, Homo sapiens
LGHGGRVLIAWPPVPQGMLIFDLSCKVSFFCMLESRTLSHLGNTGLDA

SEQ ID NO: 4870 - protein, 21 aa, Homo sapiens
LNPEPASPKLVGQKDRQIPLA

SEQ ID NO: 4871 - protein, 301 aa, Homo sapiens
LKVVCTHVPILKPMDLMVEASPRRIFANAHTYHINSISVNSDHETYLSADDLRINLWHLEITDRSFNIVDIKPANMEELTEVITAAEFHPHQCNVFVYSSSKGTIRLCDMRSSALCDRHSKFFEEPEDPSSRSFFSEIISSISDVKFSHSGRYMMTRDYLSVKVWDLNMESRPVETHQVHEYLRSKLCSLYENDCIFDKFECCWNGSDSAIMTGSYNNFFRMFDRDTRRDVTLEASRESSKPRASLKPRKVCTGGKRRKDEISVDSLDFNKKILHTAWHPVDNVIAVAATNNLYIFQDKIN

SEQ ID NO: 4872 - protein, 82 aa, Homo sapiens
LHLGVAFAGEVLCCLSDSVTVFPPRLSYLHGCLQLSQVLWGLSWNSFVVCSSASHSCIKKDSTKGEWHPCCCCARPEFPEGP

SEQ ID NO: 4873 - protein, 45 aa, Homo sapiens
LSLRLSHCVPSPPLLSPWLFAALPGTLGSELEFLCGLLFCFSLLY

SEQ ID NO: 4874 - protein, 87 aa, Homo sapiens
LVLLPETSLGLQPGEATSHWIHTRPHFSILETPSLDSRSVHDLPLVQFLISGLQRSSCARTQAQPRIPQTKYFLLSAPRGMCSEAAA

SEQ ID NO: 4875 - protein, 18 aa, Homo sapiens
LVPRRVSFDSPERGVCSQ

SEQ ID NO: 4876 - protein, 621 aa, Homo sapiens
LLRDASAGPGEVPAQAPRSTWRSAVMPLLAPAAATVFLEIWKRQRARVVLHWDLYVWDEEQEEMALQLINCPDYKLRPYQHSYLRSTVILVLTLLMICLMIGMAHVLVVYRVLASALFSSSAVPFLEEQVTTAVVVTGALVHYVTIIIMTKINRCVALKLCDFEMPRTFSERESRFTIRFFTLQFFTHFSSLIYIAFILGRINGHPGKSTRLAGLWKLEECHASGCMMDLFVQMAIIMGLKQTLSNCVEYLVPWVTHKCRSLRASESGHLPRDPELRDWRRNYLLNPVNTFSLFDEFMEMMIQYGFTTIFVAAFPLAPLLALFSNLVEIRLDAIKMVWLQRRLVPRKAKDIGQTGRAQDGRELGGLRPVGFPLARPAHLEKIISRISGRRQPPALLRRPRMRVEPGWEGTRSGRGRALCRLLPQTVRISEGLDAPKGDPGSASGWGWNRAAGLCPKTGHAETDRQQGSDGSWGAGCGERERGVREAPSLGPRLQGLTLGWEPRRWSGWGAQLRSSGRWRMRIPRFLPVHVRVRGAGAQRPCSAMAGDFLVNTAALGLQGDTTHRDTAGPVLAGGGGEGRTSRGTLSQTACPLLWCRDLAAGAGDHRCAGGHCQWDGHCLHI

SEQ ID NO: 4877 - protein, 30 aa, Homo sapiens
MGFGSPETASERPGVVAHTRNPNTSGGRRG

SEQ ID NO: 4878 - protein, 750 aa, Homo sapiens
LPVFCRGLCTHRLGPQLPLGCPSTSLAFETPSVALSEFSEPSCGGESETAALGGGSRSVPAPWAGLVPSLSQQLPAAGLRSLRLLVLHSNLLASVPADLARLPLLTRLDLRDNQLRDLPPELLDAPFVRLQGNPLGEASPDAPSSPVAALIPEMPRLFLTSDLDSFPVTPQGCSVTLACGVRLQFPAGATATPITIRYRLLLPEPGLVPLGPHDALLSHVLELQPHGVAFQQDVGLWLLFTPPQARRCREVVVRTRNDNSWGDLETYLEEEAPQRLWAHCQVPHFSWFLVVSRPVSNACLVPPEGTLLCSSGHPGVKVIFPPGATEEPRRVSMQVVRMAGRELQALLGEPEAAVSPLLCLSQSGPPSFLQPVTVQLPLPSGITGLSLDRSRLHLLYWAPPAATWDDITAQVVLELTHLYARFQVTHFSWYWLWYTTKNCVGGLARKAWERLRLHRVNLIALQRRRDPEQVLLQCLPRNKVDATLRRLLERYRGPEPSDTVEMFEGEEFFAAFERGIDVDADRPDCVEGRICFVFYSHLKNVKEVYVTTTLDREAQAVRGQVSFYRGAVPVRVPEEAEAARQRKGADALWMATLPIKLPRLRGSEGPRRGAGLSLAPLNLGDAETGFLTQSNLLSVAGRLGLDWPAVALHLGVSYREVQRIRHEFRDDLDEQIRHMLFSWAERQAGQPGAVGLLVQALEQSDRQDVAEEVRAVLELGRRKYQDSIRRMGLAPKDPALPGSSAPQPPEPAQA

SEQ ID NO: 4879 - protein, 679 aa, Homo sapiens
LPVFCRGLCTHRLGPQLPLGCPSTSLAFETPSVALSEFSEPSCGGESETAALGGGSRSVPAPWAGLVPSLSQQLPAAGLRSLRLLVLHSNLLASVPADLARLPLLTRLDLRDNQLRDLPPELLDAPFVRLQGNPLGEASPDAPSSPVAALIPEMPRLFLTSDLDSFPVTPQGCSVTLACGVRLQFPAGATATPITIRYRLLLPEPGLVPLGPHDALLSHVLELQPHGVAFQQDVGLWLLFTPPQARRCREVVVRTRNDNSWGDLETYLEEEAPQRLWAHCQVPHFSWFLVVSRPVSNACLVPPEGTLLCSSGHPGVKVIFPPGATEEPRRVSMQVVRMAGRELQALLGEPEAAVSPLLCLSQSGPPSFLQPVTVQLPLPSGITGLSLDRSRLHLLYWAPPAATWDDITAQVVLELTHLYARFQVTHFSWSVPPSFLSPPPPVCTALLTPSSPRYWLWYTTKNCVGGLARKAWERLRLHRVNLIALQRRRDPEQVLLQCLPRNKVDATLRRLLERYRGPEPSDTVEMFEGEEFFAAFERGIDVDADRPDCVEGRICFVFYSHLKNVKEVYVTTTLDREAQAVRGQVSFYRGAVPVRVPEEAEAARQRKGADALWMATLPIKLPVGLRDSRGAGQDRGPGVTRVTWWSWGWSPGLNALFPSNRDFEGPRGHGGGLASPWHP

SEQ ID NO: 4880 - protein, 369 aa, Homo sapiens
LPVFCRGLCTHRLGPQLPLGCPSTSLAFETPSVALSEFSEPSCGGESETAALGGGSRSVPAPWAGLVPSLSQQLPAAGLRSLRLLVLHSNLLASVPADLARLPLLTRLDLRDNQLRDLPPELLDAPFVRLQGNPLGEASPDAPSSPVAALIPEMPRLFLTSDLDSFPVTPQGCSVTLACGVRLQFPAGATATPITIRYRLLLPEPGLVPLGPHDALLSHVLELQPHGVAFQQDVGLWLLFTPPQARRCREVVVRTRNDNSWGDLETYLEEEAPQVRATQACRWRVESCCPEPCTSAQSLTLAPSTLPRPSWILLPYVPGTFHPTPSLLDPASLCPWQLPPHPVPPGSCSLCPWHLPPRPVSPGSCSLCP

SEQ ID NO: 4881 - protein, 113 aa, Homo sapiens
LRLEAWAASWSSTWPPTGCRASQPLWVSSPCAPTHWPHGRVPEACLSSAGASAPTGLVHSCLLVVPPPPWPLRLPQWLCQSSLSPAVEESLKQLLWEAAAGVSQRRGLGWCQA

SEQ ID NO: 4882 - protein, 46 aa, Homo sapiens
VRPPGSRLCWLLAVPSSRRSDAPLSTGRGDPGGRSGRESWKRCFLS

SEQ ID NO: 4883 - protein, 41 aa, Homo sapiens
LPPHPWVLHYYLLTDHHGLPALPPSQPWAAAVTPSPLQCMS

SEQ ID NO: 4884 - protein, 140 aa, Homo sapiens
LWPVEGLARGPILDLSYGIPVLHVKASLMIRLVGRVPREEGAWGCGCVMCSSVTTGLPLSSQPPVPSQTSSYSCMLPTSPSVNGRSYDTYTPPHMQTHMNSQPMGTSGTTSTGLISPGVSVPVQVPGSEPDMSQYWPRLQ

SEQ ID NO: 4885 - protein, 70 aa, Homo sapiens
VMGAHRVPAPPPPAPPSRWDPLLCRGGSRSGLPLCTLQKPLPFHLESLGADHTSSAWKPGAVSRETSSAL

SEQ ID NO: 4886 - protein, 626 aa, Homo sapiens
VGSTTLQRRKPFRPPSVHFAKASALPSRIPWRRSHFLCLETWSRLSRDVLRPVEGRFGSSCAVAAPLAGFQGLIECGYLAVDSPPSCWTPGGSNPAAPLPQALLPPRLPPTVLPFLGPGLSGELEMFTLPQKDFRAPTTCLGPTCMQDLGSSHGEDLEGECSRKLDQKLPELRGVGDPAMISSDTSYLSSRGRMIKWFWDSAEEGYRTYHMDEYDEDKNPSGIINLGTSENKLCFDLLSWRLSQRDMQRVEPSLLQYADWRGHLFLREEVAKFLSFYCKSPVPLRPENVVVLNGGASLFSALATVLCEAGEAFLIPTPYYGAITQHVCLYGNIRLAYVYLDSEVTGLDTRPFQLTVEKLEMALREAHSEGVKVKGLILISPQNPLGDVYSPEELQEYLVFAKRHRLHVIVDEVYMLSVFEKSVGYRSVLSLERLPDPQRTHVMWATSKDFGMSGLRFGTLYTENQDVATAVASLCRYHGLSGLVQYQMAQLLRDRDWINQVYLPENHARLKAAHTYVSEELRALGIPFLSRGAGFFIWVDLRKYLPKGTFEEEMLLWRRFLDNKVLLSFGKAFECKEPGWFRFVFSDQVHRLCLGMQRVQQVLAGKSQVAEDPRPSQSQEPSDQRR

SEQ ID NO: 4887 - protein, 334 aa, Homo sapiens
MNYFIDPVTIECGHSFCRPCFYLNWQDMAVLAQRSICKKTTRQRNLKTDICLKNMASFVRKASLWQFLRSEEQISGMHGETKKMFCEVDKSLLCLLCSNSQEHRNHRHCPIEWAAEERREELLKKMQSLWEKAWENLRNLNMETTRTRSWKDYVSLRIEAIRAEYQKMPAFLHEEEQHHLERLRKEDEDIFQQLNESKARMKHSRELLRGMYEDLKQMCHKADVELLQALGDILHRYESLLLQASEPVNPELSAGPITGLLDRLSGFKVDFTVQPERANSHIFLHGDLRSMNVGCDPQEDPDITAKSECFLVWGAQAFTSGKYYWEVHVGDSWN

SEQ ID NO: 4888 - protein, 78 aa, Homo sapiens
LLTGPVYSSSSPVSVVLCSLRSKEEPCEEGSLPQSLHTHQDTQVGGTGKLRAGQARAASLLAQLGPKMGKEQKLGVIE

SEQ ID NO: 4889 - protein, 27 aa, Homo sapiens
LGLREGKEERRASDAQGQVIALFPKFR

SEQ ID NO: 4890 - protein, 54 aa, Homo sapiens
LVWVEWGQAVEKGTPGSLRDSVLPGGTGCHESSRLRGRSLHYAPQEAVRGEQVT

SEQ ID NO: 4891 - protein, 74 aa, Homo sapiens
LVSMVARLGRGSGRFAHPRAGGDWREAAVGCRALRRAWGVAVSVSELCSRRRGETREAIVATLRLLVSSQAVRP

SEQ ID NO: 4892 - protein, 13 aa, Homo sapiens
MVVHACSSSYPGG

SEQ ID NO: 4893 - protein, 2089 aa, Homo sapiens
LLAPSRGRAPLPRWGRPWREREAGPRGPQAPDGAWAGGRPHEGPGRGGAGSSGGAMGSQVLQILRQGVWASLTGGWFFDPHQSTFSNCFHLYVWIFLLIFPFLLYMVLPPSLMVAGVYCLVVAVIFATIKTVNYRLHAMFDQGEIVEKRSSTMGELEEEPAQGDSNPPRDPGVEMTVFRKVSSTPPVRCSSQHSVFGFNQVSELLPRMEDSGPLRDIKELVREQGSNNVIVTSADREMLKLSSQEKLIGDLPQTPPGAVPDPSLASTDSSEPSPLAGDGAPWSGSSMADTPMSPLLKGSLSQELSKSFLTLTQPDRALVRTSSRREQRRGAGGYQPLDRRGSGEPTPQKAGSSDSCFSGTDRETLSSFKSEKTNSTHLDSPPGGPAPEGSDTDPPSEAELPASPDAGVPSDDTLRSFDTVIGAGTPPGLAEPLLVVRPKDLALLRPSKRQPPLRRHSPPGRAPRRPLLEGGGFFEDEDTSEGSELSPASSLRSQRRYSTDSSSSTSCYSPESSRGAAGGPRKRRAPHGAEEGTAVPPKRPYGTQRTPSTASAKTHARVLSMDGAGGDVLRPPLAGCKAELEAQVGVEQAASEPVVLPAEARRGPAANQPGWRGELQEEGAVGGAAEETGRRDRSSSVRRTQAIRRRHNAGSNPTPPASVMGSPPSSLQEAQRGRAASHSRALTLPSALHFASSLLLTRAGANVHEACTFDDTSEGAVHYFYDESGVRRSYTFGLAGGGYENPVGQQGEQTANGAWDRHSHSSSFHSADVPEATGGLNLLQPRPVVLQGMQVRRVPLEIPEEQTLMEEAPPRAQHSYKYWLLPGRWTSVRYERLALLALLDRTRGVLENIFGVGLSSLVAFLGYLLLLKGFFTDIWVFQFCLVIASCQYSLLKSVQPDAASPMHGHNWVIAYSRPVYFCICCLLIWLLDALGSAQPFPPVSLYGLTLFSASFFFCARDVATVFTLCFPFVFLLGLLPQVNTCLMYLLEQIDMHGFGGTAATSPLTAVFSLSRSLLAAALLYGFCLGAIKTPWPEQHVPVLFSVFCGLLVALSYHLSRQSSDPTVLWSLIRSKLFPELEERSLETARAEPPDPLPDKMRQSVREVLHSDLVMCVVIAVLTFAISASTVFIALKSVLGFVLYALAGAVGFFTHYLLPQLRKQLPWFCLSQPVLKPLEYSQYEVRGAAQVMWFEKLYAGLQCVEKYLIYPAVVLNALTVDAHTVVSHPDKYCFYCRALLMTVAGLKLLRSAFCCPPQQYLTLAFTVLLFHFDYPRLSQGFLLDYFLMSLLCSKLWDLLYKLRFVLTYIAPWQITWGSAFHAFAQPFAVPHSAMLFVQALLSGLFSTPLNPLLGSAVFIMSYARPLKFWERDYNTKRVDHSNTRLVTQLDRNPGADDNNLNSIFYEHLTRSLQHTLCGDLVLGRWGNYGPGDCFVLASDYLNALVHLIEVGNGLVTFQLRGLEFRGTYCQQREVEAITEGVEEDEGCCCCEPGHLPRVLSFNAAFGQRWLAWEVTASKYVLEGYSISDNNAASMLQVFDLRKILITYYVKSIIYYVSRSPKLEVWLSHEGITAALRPVRVPGYADSDPTFSLSVDEDYDLRLSGLSLPSFCAVHLEWIQYCASRRSQPVDQDWNSPLVTLCFGLCVLGRRALGTASHSMSASLEPFLYGLHALFKGDFRITSPRDEWVFADMDLLHRVVAPGVRMALKLHQDHFTSPDEYEEPAALYDAIAANEERLVISHEGDPAWRSAILSNTPSLLALRHVLDDASDEYKIIMLNRRHLSFRVIKVNRECVRGLWAGQQQELVFLRNRNPERGSIQNAKQALRNMINSSCDQPLGYPIYVSPLTTSLAGSHPQLRALWGGPISLGAIAHWLLRTWERLHKGCGAGCNSGGNVDDSDCSGGGGLTSLSNNPPVAHPTPENTAGNGDQPLPPGPGWGPRSSLSGSGDGRPPPLLQWPPPRLPGPPPASPIPTEGPRTSRPPGPGLLSSEGPSGKWSLGGRKGLGGSDGEPASGSPKGGTPKSQAPLDLSLSLSLSLSPDVSTEASPPRASQDIPCLDSSAPESGTPMGALGDWPAPIEERESPAAQPLLEHQY

SEQ ID NO: 4894 - protein, 89 aa, Homo sapiens
VSSIMDSLQLNQNNAPDTSPCMALALSLCLTPAFEGLAFLPYRGLCRLFPCSTMAEGNQCNSTGSLQDPEGVWSGTSLLSLFSSALIVG

SEQ ID NO: 4895 - protein, 35 aa, Homo sapiens
VCLCEAQKLTSSALQAAAHLVLHGLIASQDLVFQL

SEQ ID NO: 4896 - protein, 142 aa, Homo sapiens
VPSARPSARRHCPSQPSRQSRGPRGCRGPNPRMLPCASCLPGSLLLWALLLLLLGSASPQDSEEPDSYTECTDGYEWDPDSQHCRGVCAWGTKHPQEPGKGLIAAFQGTAPPPRTAVGAQQPVLCPALLHRGQLWLSGGQLS

SEQ ID NO: 4897 - protein, 230 aa, Homo sapiens
MNKPSDGRPKYLVVNADEGEPGTCKDREILRHDPHKLLEGCLVGGRAMGARAAYIYIRGEFYNEASNLQVAIREAYEAGLIGKNACGSGYDFDVFVVRGAGAYICGEETALIESIEGKQGKPRLKPPFPADVGVFGCPTTVANVETVAVSPTICRRGGTWFAGFGRERNSGTKLFNISGHVNHPCTVEEEMSVPLKELIEKHAGTDRPGHSCGDRHGPLDGHRESHRPPH

SEQ ID NO: 4898 - protein, 102 aa, Homo sapiens
VWSARRRLQNQTSFIVDQVNFTLNKNSTVFSGVSCTGAGKGVAVSTPGPAFHMTVSPEASLRFIINRDRAGRALKRRIKFLLMGSVVLSPFTSEPQAHWWSC

SEQ ID NO: 4899 - protein, 44 aa, Homo sapiens
MRPQILLLLALLTLGLAAQHQDKVPCKMVKSLTQMTPIPHTMES

SEQ ID NO: 4900 - protein, 154 aa, Homo sapiens
VEAAHSPGEMTGLSMDGGGSPKGDVDPFYYGKPGPLRTLPEPSGPLPPSSGLSQPQVHALCPLSPLVTTGCCGQAAERDSCWERPPIPLLLPSLSGDYETVRNGGLIFAGLAFIVGLLILLSKWGGLQGRGADQGTSLLKAAEQAGFRELPREG

SEQ ID NO: 4901 - protein, 1064 aa, Homo sapiens
VSPCPPPTSRKHPTKALGKETNGEEENERLQEGAPVLALPPTWGPSGYQCPWRGFLAASPTKELWSLRTMDALNRNQIGPGCQTQTMVQKGPLDLIETGKGLKVQTDKPHLVSLGSGRLSTAITLLPLEEGRTVIGSAARDISLQGPGLAPEHCYIENLRGTLTLYPCGNACTIDGLPVRQPTRLTQGCMLCLGQSTFLRFNHPAEAKWMKSMIPAGGRAPGPPYSPVPAESESLVNGNHTPQTATRGPSACASHSSLVSSIEKDLQEIMDSLVLEEPGAAGKKPAATSPLSPMANGGRYLLSPPTSPGAMSVGSSYENTSPAFSPLSSPASSGSCASHSPSGQEPGPSVPPLVPARSSSYHLALQPPQSRPSGARSESPRLSRKGGHERPPSPGLRGLLTDSPAATVLAEARRATESPRLGGQLPVVAISLSEYPASGALSQPTSIPGSPKFQPPVPAPRNKIGTLQDRPPSPFREPPGSERVLTTSPSRQLVGRTFSDGLATRTLQPPESPRLGRRGLDSMRELPPLSPSLSRRALSPLPTRTTPDPKLNREVAESPRPRRWAAHGASPEDFSLTLGARGRRTRSPSPTLGESLAPHKGSFSGRLSPAYSLGSLTGASPCQSPCVQRKLSSGDLRVPVTRERKNSITEISDNEDDLLEYHRRQRQERLREQEMERLERQRLETILNLCAEYSRADGGPEAGELPSIGEATAALALAGRRPSRGLAGASGRSSEEPGVATQRLWESMERSDEENLKEECSSTESTQQEHEDAPSTKLQGEVLALEEERAQVLGHVEQLKVRVKELEQQLQESAREAEMERALLQGEREAERALLQKEQKAVDQLQEKLVALETGIQKERDKEAEALETETKLFEDLEFQQLERESRVEEERELAGQGLLRSKAELLRSIAKRKERLAILDSQAGQIRAQAVQESERLARDKNASLQLLQKEKEKLTVLERRYHSLTGGRPFPKTTSTLKEVYRSKMDGEATSPLPRTRSGPLPSSSGSSSSSSQLSVATLGRSPSPKSALLTQNGTGSLPRNLAATLQDIETKRQLALQQKGE

SEQ ID NO: 4902 - protein, 52 aa, Homo sapiens
LSVHGKNTFPKEREALTEAAFLLSSGRRQHITTCHIEIGAHSAISPSVLSRA

SEQ ID NO: 4903 - protein, 49 aa, Homo sapiens
LFFCVPPMVGPLFTSAVSSFSCKKSLECTKLCLPQIENVKGTEDSGEEK

SEQ ID NO: 4904 - protein, 592 aa, Homo sapiens
LDRGWYVPHVSWVLVWPATRVPCGQTLPGVRANYQRSGAGASVRVCACVCASAVEGGDQLLHTFNTALKRESERETGDAQIPPRSPKPTVPQIIVQSPKNRNRGNEQQLNMDEGIPHLQERQLLEHRDFIGLDYSSLYMCKPKRSMKRDDTKDTYKLPHRLIEKKRRDRINECIAQLKDLLPEHLKLTTLGHLEKAVVLELTLKHLKALTALTEQQHQKIIALQNGERSLKSPIQSDLDAFHSGFQTCAKEVLQYLSRFESWTPREPRCVQLINHLHAVATQFLPTPQLLTQQVPLSKGTGAPSAAGSAAAPCLERAGQKLEPLAYCVPVIQRTQPSAELAAENDTDTDSGYGGEAEARPDREKGKGAGASRVTIKQEPPGEDSPAPKRMKLDSRGGGSGGGPGGGAAAAAAALLGPDPAAAAALLRPDAALLSSLVAFGGGGGAPFPQPAAAAAPFCLPFCFLSPSAAAAYVQPFLDKSGLEKYLYPAAAAAPFPLLYPGIPAPAAAAAAAAAAAAAAAAFPCLSSVLSPPPEKAGAAAATLLPHEVAPLGAPHPQHPHGRTHLPFAGPREPGNPESSAQEDPSQPGKEAP

SEQ ID NO: 4905 - protein, 207 aa, Homo sapiens
LSEVQRFRRPRDPRRFPRATCKSCPGPGRRCVPARWQLATPLESPLCCGLPVAFGGSVCLVAYLGLFMLCVSYQVDERTCIQFSMKLLYFLLSALGLTVCVLAVAFAAHHYSQLTQFTCETTLDSCQCKLPSSEPLSRTFVYRDVTDCTSVTGTFKLFLLIQMILNLVCGLVCLLACFVMWKHRYQVFYVGVRICSLTASEGPQQKI

SEQ ID NO: 4906 - protein, 36 aa, Homo sapiens
VTTLSPLGETDLVLTTTDKGLQGPGRDMILKHVTSW

SEQ ID NO: 4907 - protein, 39 aa, Homo sapiens
VGPLRPVSPATPAPLSWELRLLEKPGQWEAQLRAIDLSL

SEQ ID NO: 4908 - protein, 16 aa, Homo sapiens
VNHKNVVCLGCSVCLC

SEQ ID NO: 4909 - protein, 20 aa, Homo sapiens
MLYRRALPGTVSSLRSVPPR

SEQ ID NO: 4910 - protein, 10 aa, Homo sapiens
VYETMQKYKG

SEQ ID NO: 4911 - protein, 27 aa, Homo sapiens
VGTGGKRGMKVLEQKRPEKGPLHFPSL

SEQ ID NO: 4912 - protein, 395 aa, Homo sapiens
LRNHLLESEGSYTSEALASEHREAKLRKKVTVLEEKLVSSSNAMENASHQASVQVESLQEQLNVVSKQRDETALLSASQQQVKQYALSLANLQMVLQHFQKEEKSMYSAELQKQKQLIAEWKKKAESLERKVISLQERLDEADAALDSASRLTEQLDLKEEQIEELKKQNEFQQEMLDDVQKKLVNLANSLEGKVDKVLMRNLFISHFHMPKNQRHEVLRLMGSILGVRREEMEQLFHDNQGSVTRWMTGWLGRGSKSVPNTPLRPNQQSVLNSSFSECFVKFLETESHSSVPPPKLSVHDMKPLESPGRRKLDTNAPESFKDTAESRSGRRREVNSVLAPRSAAVPLINPAGLGPGGPQHLLLKPISDVWPTFTPLPVLPDNSAGVVLKDLGKQ

SEQ ID NO: 4913 - protein, 161 aa, Homo sapiens
MEEMSGESVVSSAVPAAATRTTSFKGTSPSSKYVKLNVGGALYYTTMQTLTKQDTMLKAMFSGRMEVLTDSEGWILIDRCGKHFGTILNYLRDGAVPLPESRREIEELLAEAKYYLVQGLVEECQAALQVGITLSSHMGGEAPSLPAFLIFPLCKMGAVSV

SEQ ID NO: 4914 - protein, 99 aa, Homo sapiens
LRDPGERAAHRPAGSPPSPRSALSGLPGAPSSGPGGASDRLKRAGRGLGGRGLPSRRAAEGEGGPPFWRGEGGWVRSPQPALRSSGPREGRLSGGGGAG

SEQ ID NO: 4915 - protein, 22 aa, Homo sapiens
LPSLKAASHSPKDTSPPPFEVH

SEQ ID NO: 4916 - protein, 54 aa, Homo sapiens [sequence omitted]

SEQ ID NO: 4917 - protein, 281 aa, Homo sapiens
LQSPFCMPGAELMALPGSYPPSEMGTLTFMAEGTSPQRRSVLPRVPEKQRGSASEPWPGSTAARLCQPLQLCFLLPGNGIDVTLGRGCCCFWKTWRHRALCPWAIFSARPSSESWCSPQIKESEGVVNDELPNCWECPKCNHAGKTGKQKRGPGFKYASNLPGSLLKEQKMNRDNKEGQEPAKRRSECEEAPRRRSDEHSKKVPPDGLLRRKSDDVHLRKKRKYEKPQELSGRKRASSLQTSPGSSSHLSPRPPLGSSLSPWWRSSLTYFQQQVLPRRTPS

SEQ ID NO: 4918 - protein, 263 aa, Homo sapiens
LLSLGFCKLVRNKSLTLESFGARALKSFWCFLSRLHPSITVLVTGAKWLSVLEEKAMKPVETHSLQMLHTILSTGSPLKAQSYEYVYRCIKSSILLGSISGGTDIISCFMGHNFSLPVYKGEIQARNLGMAVEAWNEEGKAVWGESGELVCTKPIPCQPTHFWNDENGNKYRKAYFSKFPGIWAHGDYCRINPKTGGIVMLGRSDGTLNPNGVRFGSSEIYNIVYAQRQESGSCRQTDHRWKSRGARRCFLEPRDPGSVPGHP

SEQ ID NO: 4919 - protein, 172 aa, Homo sapiens
VCGRGPSLYLCICLEYCIISNSLRKRERQPGCVAVVCVGLIFNSPIPGKAVWGESGELVCTKPIPCQPTHFWNDENGNKYRKAYFSKFPGIWAHGDYCRINPKTGGIVMLGRSDGTLNPNGVRFGSSEIYNIVYAQRQESGSCRQTDHRWKSRGARRCFLEPRDPGSVPGHP

SEQ ID NO: 4920 - protein, 195 aa, Homo sapiens
VLQFLQSGPVANGEGVGFSPGPPPGSQEVLVSTSRAPKLQGAHGPIWWVRTCRGPGGSHPHLSGLCLHHPRGHALKGCLQGLQARGTPQGGQRLLPASPQSPAASRLAVDLHVVGHTSHYKATPGPIPAPSTAPTCGQVLPPPQDLVSRQPHSSLLESKARHSPKREGVFGGALTVSRPQGSWAGSNQWSSREQR

SEQ ID NO: 4921 - protein, 32 aa, Homo sapiens
VLLRSSTLTQPHNKKFVYDQASCKWNSTNQEG

SEQ ID NO: 4922 - protein, 12 aa, Homo sapiens
LLGKMMTSTPDV

SEQ ID NO: 4923 - protein, 91 aa, Homo sapiens
LFSVKQSRDPVQYLDCHRPVSGVHNGKIISRGVLLSVCVTSMKTRVSLISTICGMFRDERLVSLLAAEHYEIMVRSPRHLSLFLYPPATVV

SEQ ID NO: 4924 - protein, 93 aa, Homo sapiens
VQYLDCHRPVSGVHNGKIISRGVLLSVCVTSMKTRVSLISTICGMFRDERLVSLLAAEHYEIMAWGSVSRTAQGTRFPVALAPTRETSACSRW

SEQ ID NO: 4925 - protein, 67 aa, Homo sapiens
VQYLDCHRPVSGVHNGKIISRGVLLSVCVTSMKTRVSLISTICGMFRDERLVSLLAAEHYEIMRPAP

SEQ ID NO: 4926 - protein, 19 aa, Homo sapiens
LQLLLQKSQFSCGIKMVQK

SEQ ID NO: 4927 - protein, 27 aa, Homo sapiens
LWVWTELASRSVSKMLFSAGHYKRFLL

SEQ ID NO: 4928 - protein, 82 aa, Homo sapiens
LGHRLWGPDLPGETHGSKEPRNPSTKWPLWQDGRVRSGEAGCVRGKGKKWKQRLFRGTWERSLHSSQASSLRPLCRLGPGTA

SEQ ID NO: 4929 - protein, 338 aa, Homo sapiens
VDSDLTNHAYMIASIKSQKDRVQRASGWPEKRHKLGEPKTPAWRAAPAAGPALGNSVRRSAVCVSSAPIPSHLNEGFGRDTASRRNAPAHPSRNPHHLPPTPDQSSRRPGVSHQRAERAFELLLHHDQDALGHLVHVCVHQSCSESPQGLFHDAHPGVTLTLGQEEKACPEDSASSSSSLPAPSVLGAHTGVGPQAGGHVPGWQDLSTVKLDAPAGPVLPARIPLPQDALHTLRIPSRCSGACTEGLGPAPGNSKEANGFMSRFCQIASEAALFAVAAECRAGHLSGQSGAPLPCISWAMRGDLCPLHRSCVPCACDRVFPVYSVLLHVFQFRFVVCE

SEQ ID NO: 4930 - protein, 353 aa, Homo sapiens
LDIWMYFLCLLTFINCAYVKWGTLVQDIFTYAKVLALIAVIVAGIVRLGQGASTHFENSFEGSSFAVGDIALALYSALFSYSGWDTLNYVTEEIKNPERNLPLSIGISMPIVTIIYILTNVAYYTVLDMRDILASDAVAVTFADQIFGIFNWIIPLSVALSCFGGLNASIVAASRLFFVGSREGHLPDAICMIHVERFTPVPSLLFNGIMALIYLCVEDIFQLINYYSFSYWFFVGLSIVGQLYLRWKEPDRPRPLKLSVFFPIVFCLCTIFLVAVPLYSDTINSLIGIAIALSGLPFYFLIIRVPEHKRPLYLRRIVGSATRYLQVLCMSVAAEMDLEDGGEMPKQRDPKSN

SEQ ID NO: 4931 - protein, 163 aa, Homo sapiens
LGSQEAAWQQRWSARAGRPSLGSSPLPQGPALLPWPSGAPVVLDSHQPWAFGGFNPRVFGGVSPFSVLFSKPLPLAALYPRRSPHLPHPSSLASTGAAGDEALRHPQPSPPCSPSLHCSGWPDAWGVPELHLPTPGLVGCGSAPFSVAQLRTNDALQCTGRLG

SEQ ID NO: 4932 - protein, 20 aa, Homo sapiens
LSLPHLLPAHIYHRPLWHGM

SEQ ID NO: 4933 - protein, 53 aa, Homo sapiens [sequence omitted]

SEQ ID NO: 4934 - protein, 62 aa, Homo sapiens
LPEKPYPFWFSLLRPQLLALIILVREQLVILVGLVFGLRIFYCGLNYNHCTVMIQCCIMILL

SEQ ID NO: 4935 - protein, 54 aa, Homo sapiens
LDKPPTRSRLRSGRSLHITRVCHHPLCFSVLCDTNAQGPQGTIIINQFVLSLTT

SEQ ID NO: 4936 - protein, 20 aa, Homo sapiens
LFAKVPKLIHLTMMQMFFIL

SEQ ID NO: 4937 - protein, 17 aa, Homo sapiens
LKTIDIVNSSGWLETKV

SEQ ID NO: 4938 - protein, 88 aa, Homo sapiens
LWIRLSFRNNHTVNGHNGEVRKALLKQEMANASASQRGRSGSGNFGGGCGGVFSGNDNFGHGRNFSGHGGFDGSRGDGGYGGSGDGWL

SEQ ID NO: 4939 - protein, 46 aa, Homo sapiens
LLDLMACLGFYHMRRGCFFGVTRTEFPILFPRRDTMFSIKLKKSRA

SEQ ID NO: 4940 - protein, 144 aa, Homo sapiens
LEGPAQVRQPRSLLPASGDPPPSPGTSLGHVCWDLLSLWDLPTYPGLGGAQARMQRPAGPLSIVRATECLQHSLSLACHCVNRRRSTAPASSRRLCSPGSSFLRARVNMYISQARPAGAARVCFSCDDTCTINYLFKGTWIIMK

SEQ ID NO: 4941 - protein, 38 aa, Homo sapiens
LPEVLCLSKHSNICIWLLCFPSATVALPGRGVMWSFQP

SEQ ID NO: 4942 - protein, 151 aa, Homo sapiens
LESECFAFVVNLSETNWVVFLFDNSLLPLLGMLQDKRMEIDKHSLNIGDYNRTVGKGPGSRPQISKESSMERNPYFDKNGNPSMFGVGNTAAQPRGMQQPPAQPLSSSQPNLRAQVPPPLLSPQVNKLSLHSPVYLQKGSCMILYLNKMAN

SEQ ID NO: 4943 - protein, 121 aa, Homo sapiens
LLSDRKLGVWPSACLSLSVADSHAAVSVCLRPVHPCCGRLVPSLPSLSSVCCSVGHLPGGPAARHQSDRSYDSLIGDSGWVWILTPGLCLLSQTLICHPHAEPSCHPQKPIRLPPAHGMDF

SEQ ID NO: 4944 - protein, 52 aa, Homo sapiens
LSDCERLRTLEAWLGMEVFLAWGPGRTTVLGTGLRPPRGPECPVKSAQAASL

SEQ ID NO: 4945 - protein, 135 aa, Homo sapiens
MAAKTDPVPSRNGEGGRDQSREDEDNSTLLPSPQANQPAADRGPGHSQDKRMQAGKWHYCPCPPHPVMCDSRHQGRPRSPAAVGRNLPGATGAHSPPCRTGVSVDTPTPNSATKQASQLSSSFTLSDTITPATLF

SEQ ID NO: 4946 - protein, 190 aa, Homo sapiens
LESACWPRITWRCMRTRRLCEHKYGNAPRVRINGHVAARFPFIPMPLDYILPELLKNAMRATMESHLDTPYNVPDVVITIANNDVDLIIRISDRGGGIAHKDLDRVMDYHFTTAEASTQDPRISPLFGHLDMHSGAQSGPMHGFGFGLPTSRAYAEYLGGSLQLQSLQGIGTDVYLRLRHIDGREESFRI

SEQ ID NO: 4947 - protein, 210 aa, Homo sapiens
LSGPGEAAGSRLLAAPGPPSHFPQEVPRRAGRAAALPQPRADAAAPGPGGLQAAARRAQVSVGPRPRPRGRSHPALAFAPPRSCFCRSHNLPQILALPPSFAPWSPLSQLPPPRVTSSPRALLDGLALNTHLRDLHLDLSACELRSAGAQVIQDLVCDAGAVSSLDLADNGEAAGEPILASSTRFPIPTLPLQLRLVRDPSHPQASAQTW

SEQ ID NO: 4948 - protein, 173 aa, Homo sapiens
LEQRQYLPIFAVQQELLTIIRDNSIVIVVGETGSGKTTQLTQYLHEDGYTDYGMIGCTQPRRVAAMSVAKRVSEEMGGNLGEEVGYAIRFEDCTSENTLIKYMTDGILLRESLREADLDHYSAIIMDEAHERSLNTDVLFGLLREVRAVWFGLSAHGVLTSAPPVASGLLQVG

SEQ ID NO: 4949 - protein, 132 aa, Homo sapiens
VNIRTGMPCHLHPTSSLFGMGYTPDYIVYHELVMTTKEYMQCVTAVDGEWLAELGPMFYSVKQAGKSRQVRILCSSQGCCLPVGSVFPPLGIEDLRSSNPLTSLCKHKGCDPAGWVCLIPHHPLQLFGRLSL

SEQ ID NO: 4950 - protein, 29 aa, Homo sapiens
MMEEAEHVLPKTERTSLNTADVGDSRGTA

SEQ ID NO: 4951 - protein, 49 aa, Homo sapiens
LGPFSFPSARGRAVQPSPGLVSGSSGFTQEVHHPVVSSVFAIMQQSMQF

SEQ ID NO: 4952 - protein, 226 aa, Homo sapiens
MASRDTFLREGLMLMCSSCLPLRGWLYKGPGRRQCGQHTDPGAVGVGTVGRQRVPGRCRGGRQHLPSEMSPGEGPHRPPPALSLQVQQERDELYRKFTAAIQEVQQKTGFKNLVLERKLQALSAAVEKKEVQFNEVLAASNLDPAALTLVSRKLEDVLESKNSTIKDLQYELAQVCKAHNDLLRTYEAKLLAFGIPLDNVGFKPLETAVIGQTLGQGPAGLVGTPT

SEQ ID NO: 4953 - protein, 66 aa, Homo sapiens
VKDQEMSLLLHPAPLGAASVIHALPGPSTHCCECASPEPVKRQLSILETQIIRALPCTEEKGSTRP

SEQ ID NO: 4954 - protein, 44 aa, Homo sapiens
VQAALASPPPAAAHLLLLLLVRAGRPGLPLQRAAGPSPVPRPQG

SEQ ID NO: 4955 - protein, 14 aa, Homo sapiens
VSAGNRVESPGPGG

SEQ ID NO: 4956 - protein, 34 aa, Homo sapiens
MSQMIGLLGFQTQDQQDSSHLYPSSPGHSAPNSE

SEQ ID NO: 4957 - protein, 84 aa, Homo sapiens
VGCGSGLGPRAACPCCCAVLASLTGRHPQPSSVVHKCLVAELPVNFWIPFLMQTLVLFSTCAVRTHWPSGVLTPTPPTPCLSPN

SEQ ID NO: 4958 - protein, 91 aa, Homo sapiens
MVVFPSLSSPTMMTVCSGSVGGRAASGPNPKTKGLCAPTRPPRKEIALPAGWGPLPTVPRLLPTQLRHLPHSGTVEKTAEPPPPFTFQKSV

SEQ ID NO: 4959 - protein, 39 aa, Homo sapiens
LREKGRKLMAGSGFFPSQRVLLFQGGPRAGRGHTMPAPW

SEQ ID NO: 4960 - protein, 33 aa, Homo sapiens
MTAAVSLTRSPAISASCAASRSASPWAWPWTWF

SEQ ID NO: 4961 - protein, 457 aa, Homo sapiens
LPPPLGILYLGTLFPKLAHTLLPNKKISLFFWAPSPGKLLPELLQPYTERVEHLSEFLVDIKPSLTFDVIPLLDPYGPAGSDPSLEFLVVSEETYRGGMAINRFRLENVTPEGDWQREWMGDGEGHFEGAVGSTMAPEERSGGSGWWEEARRNWFSVCPLSRRRRSLGRKGRMGGQVGCQGLPLTPSFPLFTLSSLPQDLEELALYQIQLLKDLRHTENEEDKVSSSSFRQRMLGNLLRPPYERPELPTCLYVIGLTGISGSGKSSIAQRLKGLGAFVIDSDHLGHRAYAPGGPAYQPVVEAFGTDILHKDGIINRKVLGSRVFGNKKQLKILTDIMWPIIAKLAREEMDRAVAEGKRVCVIDAAVLLEAGWQNLVHEVWTAVIPETEAVRRIVERDGLSEAAAQSRLQSQMSGQQLVEQSHVVLSTLWEPHITQRQVEKAWALLQKRIPKTHQALD

SEQ ID NO: 4962 - protein, 277 aa, Homo sapiens
VRRVVAPARCERRAAQTARLFCSAEGRAVGRGLRYAASVRDATAATRLAAFLGATPPGDPTRRASSAAPIPLGLLGAALSSVTLYTRKLAGTMGKKQNKKKVEEVLEEEEEEYVVEKVLDRRVVKGKVEYLLKWKGFSDEDNTWEPEENLDCPDLIAEFLQSQKTAHETDKSEGGKRKADSDSEDKGEESKPKKKKEESEKPRGFARGLEPERIIGATDSSGELMFLMKWKNSDEADLVPAKEANVKCPQVVISFYEERLTWHSYPSEDDDKKDDKN

SEQ ID NO: 4963 - protein, 34 aa, Homo sapiens
LQAPAAGMDRRGGGRGGGGGGGRPGGLEPNRQYL

SEQ ID NO: 4964 - protein, 502 aa, Homo sapiens
LGSCSQAPVQQRRPEIAPEHQRDEHPDLGALRGGRPRGAAHPGGASRPAAVLSAPRECPPAGSEPKQGSPRLCIPISMSCAGVVVCHVPTSSGLGLLGGLSVSAAWRIRLSSSRASDLAPQRREDKPYFDPTLTLFAFFPQPGACQANETIFCELGNPFKRNQRMELLIAFEVIGVTLHTRDLQVQLQLSTSSHQDNLWPMILTLLVDYTLQTSLSMVNHRLQSFFGGTVMGESGMKTVEDVGSPLKYEFQVGPMGEGLVGLGTLVLGLEWPYEVSNGKWLLYPTEITVHGNGSWPCRPPGDLINPLNLTLSDPGDRPSSPQRRRRQLDPGGGQGPPPVTLAAAKKAKSETVLTCATGRAHCVWLECPIPDAPVVTNVTVKARVWNSTFIEDYRDFDRVRVNGWATLFLRTSIPTINMENKTTWFSVDIDSELVEELPAEIELWLVLVAVGAGLLLLGLIILLLWKCGFFKRARTRALYEAKRQKAEMKSQPSETERLTDDY

SEQ ID NO: 4965 - protein, 23 aa, Homo sapiens
MTVSESQCHYIEHFRHRKNKRGF

SEQ ID NO: 4966 - protein, 82 aa, Homo sapiens
LQTTHWPRAAVPRVAAVRLRHLVRRSQLPRWLPPASFQIMKVFFLHQIERKSVVKLPVDQVPWQEGLAYATLCRIVFSAYRA

SEQ ID NO: 4967 - protein, 62 aa, Homo sapiens
LLPRWLPPASFQIMKVFFLHQIERKSVVKLPVDQVVPRESVPWQEGLAYATLCRIVFSAYRA

SEQ ID NO: 4968 - protein, 30 aa, Homo sapiens
LSRFPNFLGIYFDKFIAIMFLRDLETPANC

SEQ ID NO: 4969 - protein, 162 aa, Homo sapiens
MAGKKNVLSSLAVYAEDSEPESDGEAGIEAVGSAAEEKGGLVSDAYGEDDFSRLGGDEDGYEEEEDENSRQSEDDDSETEKPEADDPKEKLGTVTEAPRAQQAHGPACWTQRAEESHSKHDKRRDSTTSAEPGSTHTPHSFPSPGSQKPQEATGRLLASYFT

SEQ ID NO: 4970 - protein, 26 aa, Homo sapiens
LMSLLLLRGARHLVTCHFRICVNQTI

SEQ ID NO: 4971 - protein, 557 aa, Homo sapiens
LSPQAATVLFLHATQKDLSDFHQSMAQWLAYSRLYQSLEFPSSCLLHPITSIEYQWIQGRLKAEQQEELAASFSSLLTYGLSLIRRFRSVFPLSVSDSPARLQSLLRVLVQMCKMKAFGELCPNTAPLPQLVTEALQTGTTEWFHLKQQHHQPMVQGIPEAGKALLGLVQDVIGDLHQCQRTWDKIFHNTLKIHLFSMAFRELQWLVAKRVQDHTTVVGDVVSPEMGESLFQLYISLKELCQLRMSSSERDGVLALDNFHRWFQPAIPSWLQKTYNEALARVQRAVQMDELVPLGELTKHSTSAVDLSTCFAQISHTARQLDWPDPEEAFMITVKFVEDTCRLALVYCSLIKARARELSSGQKDQGQAANMLCVVVNDMEQLRLVIGKLPAQLAWEALEQRVGAVLEQGQLQNTLHAQLQSALAGLGHEIRTGVRTLAEQLEVGIAKHIQKLVGVRESVLPEDAILPLMKFLEVELCYMNTNLVQENFSRSVAAPALGALATSPSPPTAPPSWAPASVLRGVAAPALGALATSPSPPTAPLSWASASVLRGGGESLW

SEQ ID NO: 4972 - protein, 57 aa, Homo sapiens
VESEAEAWGARELPPPEVTRPGPALPSLLPPGAPGRGGGGGRGPAGLASALRHLELR

SEQ ID NO: 4973 - protein, 174 aa, Homo sapiens
LVLATRDWLTHPLAVPGVWALPVTVGKKMALLCYNRSCGQRFDPETNSDDACTYHPGVPVFHDALKGWSCCKRRTTDFSDFLSIVGCTKGRHNSEKPPEPVKPEVKTTEEKELSELKPKFQEHIQAPKTVDAIKRPSPDEPMTNLELKISASLKQALDKLKLSSGNEENKKRRQ

SEQ ID NO: 4974 - protein, 38 aa, Homo sapiens
MFTIHTCGRQCHLERRLRYGERGAWSYSILLWCHPPCP

SEQ ID NO: 4975 - protein, 90 aa, Homo sapiens
LPLSLPHSLFALLSWDDAARRPLPDASNLILNFSSSRMVMATVAEPRKPRRNQRMETHGSNGKSSDPGFPKEHWSRKMLCEKVFPGRRNL

SEQ ID NO: 4976 - protein, 65 aa, Homo sapiens
LMPLSTQMAETNQVMATVAEPRKPRRNQRMETHGSNGKSSDPGFPKEHWSRKMLCEKVFPGRRNL

SEQ ID NO: 4977 - protein, 67 aa, Homo sapiens
LAMVTPIGKLIAAFKVMATVAEPRKPRRNQRMETHGSNGKSSDPGFPKEHWSRKMLCEKVFPGRRNL

SEQ ID NO: 4978 - protein, 78 aa, Homo sapiens
LGMASSTPPSTKNLLPHTPSRNCSIQVMATVAEPRKPRRNQRMETHGSNGKSSDPGFPKEHWSRKMLCEKVFPGRRNL

SEQ ID NO: 4979 - protein, 123 aa, Homo sapiens
LKVSSSLGNSAFNSWYSGLHACLVKPMRFIQLKIQMANDQQIQIYGGLTFRELLYVACFNTDPPRALLPSFRGGFLMAVLQGLPEMQWCLRSTKKAGNLWYEARPPRRASGNRMIRPLNDSNF

SEQ ID NO: 4980 - protein, 71 aa, Homo sapiens
LCRNEVRPGARGREASALWLRPRLLPGIRSRAGELRGSLLRAGLLHHLPRVAKAEKKEKNGSGEYKRLIFF

SEQ ID NO: 4981 - protein, 85 aa, Homo sapiens
LTVGRTRMWDRQPRALVGPDLPAGRVGAVAPAGVAEMGHGHWGLHQPLWGVSGWAVGVGLGRCLCSAGTARVDLAPRVLDVFRMT

SEQ ID NO: 4982 - protein, 181 aa, Homo sapiens
MDFQHRPGGKTGSGGVASSSESNRDRRERLRQLALETIDINKDPYFMKNHLGSYECKLCLTLHNNEGSYLAHTQGKKHQTNLARRAAKEAKEAPAQPAPEKVKVEVKKFVKIGRPGYKGESARSGAGHSRCRDISVFFSLQCGRCSPDSLLPEPLFSGLGGRPSPTCSLWRCVWELSGWAR

SEQ ID NO: 4983 - protein, 375 aa, Homo sapiens
LAWSLAPALFWSEDGGTAGQGPALGLLPHQALDWGSGPCGGGGWGSKGLGTSSASQAGLGGLRDFGFLHASHLLSFWNIPPALLSSGHQGPGSTGQRVWKVRAGPVRTGSRGGAGGQQLPTLSSTGEGRAHSSFLGRVSGGSCWTQVNQVNQGSCWKLGHGPHPHGLGDCLCLPSLAAPLPWLWATWQSLDRGCRVGGALPGPSNSAQRCLRDSCRLCPHLPSKTSGCSPSLQSQCSDVFSRDCEFLRSPPRALGASLPSLSPPRRTLVSRTCDPASRGLWVARHPPRPHLHLDRTPRAVPSASAPPVPFPPSPGQCGCGHCHGACFAPYARLALLHAPASVSFQLWGLRGESCLCRAGRHSLWPGGLCQRGGNP

SEQ ID NO: 4984 - protein, 248 aa, Homo sapiens
MPVLGMEAMGTEATRRQQATVTFSQTATAIMILGLPRASKSQFYSNGGHSGNASGGGGGGGGGSSGYGSYYQGDNYNSPVPPKHAGKKQPHGGQQKPSYGSGYQSHQGQQQSYNQSPYSNYGPPQGKQKGYNHGQGSYSYSNSYNSPGGGGGSDYNYESKFNYSGSGGRSGGNSYGSGGASYNPGSHGGYGGGSGGGSSYQGKQGGYSQSNYNSPGSGQNYSGPPSSYQSSQGGYGRNADHSMNYQYR

SEQ ID NO: 4985 - protein, 45 aa, Homo sapiens
LAQECVTPEMGPRISLHFLLSVGYWTRASAPILFSRISMSFNFTF

SEQ ID NO: 4986 - protein, 647 aa, Homo sapiens
LALALRERRPGRSVSASVALGPTLAFKEDTRTPGSWEMDSVAFEDVAVNFTQEEWALLGPSQKSLYRNVMQETIRNLDCIEMKWEDQNIGDQCQNAKRNLRSHTCEIKDDSQCGETFGQIPDSIVNKNTPRVNPCDSGECGEVVLGHSSLNCNIRVDTGHKSCEHQEYGEKPYTHKQRGKAISHQHSFQTHERPPTGKKPFDCKECAKTFSSLGNLRRHMAAHHGDGPYKCKLCGKAFVWPSLFHLHERTHTGEKPYECKQCSKAFPFYSSYLRHERIHTGEKAYECKQCSKAFPDYSTYLRHERTHTGEKPYKCTQCGKAFSCYYYTRLHERTHTGEQPYACKQCGKTFYHHTSFRRHMIRHTGDGPHKCKICGKGFDCPSSVRNHETTHTGEKPYECKQCGKVLSHSSSFRSHMITHTGDGPQKCKICGKAFGCPSLFQRHERTHTGEKPYQCKQCGKAFSLAGSLRRHEATHTGVKPYKCQCGKAFSDLSSFQNHETTHTGEKPYECKECGKAFSCFKYLSQHKRTHTVEKPYECKTCRKAFSHFSNLKVHERIHSGEKPYECKECGKAFSWLTCLLRHERIHTGEKPYECLQCGKAFTRSRFLRGHEKTHTGEKLYECKECGKALSSLRSLHRHKRTHWKDTL

SEQ ID NO: 4987 - protein, 104 aa, Homo sapiens
LALALRERRPGRSVSASVALGPTLAFKEDTRTPGSWEMDSVAFEDVAVNFTQEEWALLGPSQKSLYRNVMQETIRNLDCIEVIHVKLKMTVNVEKLLARFQIVL

SEQ ID NO: 4988 - protein, 39 aa, Homo sapiens
LALALRERRPGRSVSASVALGPTLAFKEDTRTPGSWEMK

SEQ ID NO: 4989 - protein, 20 aa, Homo sapiens
VTPTTSAGHSTGDRSYGRGT

SEQ ID NO: 4990 - protein, 122 aa, Homo sapiens [sequence omitted]

SEQ ID NO: 4991 - protein, 88 aa, Homo sapiens [sequence omitted]

SEQ ID NO: 4992 - protein, 144 aa, Homo sapiens
LERRRVAEGRAEIFYLLCLCIAGFPAPNLTPPPRTRRRNSAPLFGGRQPRVHGDCRARRVRSRASSEPTRGAPVAGNCGGMAWYESREPVARGGSPPTSKGWRTLETEELEAPVAPFHSSSKYCLFSKYWPSDSALVSPLEGSR

SEQ ID NO: 4993 - protein, 98 aa, Homo sapiens
MLPGLVRDRGCWLQLGPPPLHLAGLAPGSLGGATLDIATWGSPVSITHTPVLPRAGWQAALVGLRGQGQPSWFISTGAICSSASAPEAGAQGPARQEA

SEQ ID NO: 4994 - protein, 178 aa, Homo sapiens
LKNLKHRFLQQKIYTYAGSILVAINPFKFLPIYNPKYVKMYENQQLGKLEPHVFALADVAYYTMLRKRVNQCIVISGESGSGKTQSTNFLIHCLTALSQKGYASGVERTILGAGPVLEVLRSQLVRMQLPLGKRVCYSQFPKEEDAMPWKATGGSTGTHQEAEGEREKGSGERQETLL

SEQ ID NO: 4995 - protein, 191 aa, Homo sapiens
VSWAPRTWRGCGPGDPPSPSVPRNSERARPPGIPPPRGCPGLDKLDPLLPGGRAHDPPALALPLSPARPPRVAQTRASRLPLCTPRRGRGLRGGAASNPAFPLLLLFFFFLWKREEQSVRFCPIYVSTREQTLVVCVCVFLCWFFKEMGRRKKNSPPLSSISLPPSVLSTGPPSLFCSVLFCFATSPHSCL

SEQ ID NO: 4996 - protein, 169 aa, Homo sapiens
VTQGVLTPPWPQFPHLKNGYRKGLSLRPQEALPPPPCPSCRSSAPSAPRGGRGETPNKGTGRSLCQSCHHPPVDVQAVLNKCFEADEAAGSGCVGSSRWGFLSSKTKSPSETPKLLPTSHPCFFLLLLFVCLFLKLSVTLSPRLECNAAVSAHCNLRLLGSSDSPASAS

SEQ ID NO: 4997 - protein, 102 aa, Homo sapiens
LLGFFPQQIMRYPWLKSRGNCDISLGPVPSKCDCSIHHKSCFQGRLGHIVGLNTNVTLLFCLGPDLKGTVTYCSAQQQGDERSCVDIDNREHCDISLGASAI

SEQ ID NO: 4998 - protein, 47 aa, Homo sapiens
WLQLALSPLSCFVAGILAKTLSLPPYSSRVVIFFFHQEISLAGNLSN

SEQ ID NO: 4999 - protein, 36 aa, Homo sapiens
MNWIDRGGGGFAFCPREWRFASWGRAGENRPRRKKE

SEQ ID NO: 5000 - protein, 63 aa, Homo sapiens
MEQGREWLRLPPRFGDAVRAASGALETSESLRVGWDSGPASHLPADWSAPRASVTQPASKTSL

SEQ ID NO: 5001 - protein, 18 aa, Homo sapiens
MDRRGGGRGGGGGGGRPG

SEQ ID NO: 5002 - protein, 23 aa, Homo sapiens
MRPRRAGQGAPAAHPRGGGPERP

SEQ ID NO: 5003 - protein, 39 aa, Homo sapiens
MTMMDIYTYIHIIHNDICVRIYLRLYFVGWAKFSVTITS

SEQ ID NO: 5004 - protein, 89 aa, Homo sapiens [sequence omitted]

SEQ ID NO: 5005 - protein, 62 aa, Homo sapiens
MAFLSVNIQISGFSSTGWGWESCFSLNFSLRDALRALGKSRNKYQEQRGKLYKRSWWPLLQL

SEQ ID NO: 5006 - protein, 66 aa, Homo sapiens [sequence omitted]

SEQ ID NO: 5007 - protein, 79 aa, Homo sapiens
RRPHFLAFPPPPPRRYPVHPGHLPSPLGAAAWLVAALPQGQVLRGSRSGCRRSPAPDPGLPLAPLRSRLCGSRRAQERD

SEQ ID NO: 5008 - protein, 79 aa, Homo sapiens [sequence omitted]

SEQ ID NO: 5009 - protein, 91 aa, Homo sapiens
MLGPQPDLPCVPRSVLRSGCRAVAWRKPGRCHQSFGEGEALSGKPSGSHEGGNTCGALVGGGAALQRSKKKFQKNEQQPPRPGIGAGDKGS

SEQ ID NO: 5010 - protein, 92 aa, Homo sapiens
PFYFWGFVFVLNFPVTFSGLTSHVGGVYEWRRAWVLGTGGQGSFCPGVPGCSACSARPLLGATRPETQLGQLGGLCPPSPPVLWAAQLTLFP

SEQ ID NO: 5011 - protein, 101 aa, Homo sapiens
PPAQGHFRYRSSLASAENCQVSSGPAEIAERRRTQPAPPGPSRPSGPGPAGELGGPGTGRALCPADNGGLCCGCPLAVPAHWLCPDLEAAANLSFPPHLGD

SEQ ID NO: 5012 - protein, 108 aa, Homo sapiens
GAAPSSALPAPCCRRARRGSRAGAERAVRAATGDQAAGGRAGGGGARGGVAADGDAEPGGCGGCGGCGCGGGGEAADGPAAAAALAAVTGPGPGGGCSNAVAGCGRAA

SEQ ID NO: 5013 - protein, 114 aa, Homo sapiens
LLKTLQSALIPSALSPHPEKYMEFDLNGNGDIDIMSLKRMLEKLGVPKTHLELKKLIGEVSSGSGETFSYPDFLRMMLGKRSAILKMILMYEEKAREKEKPTGPPAKKAISELP

SEQ ID NO: 5014 - protein, 22 aa, Homo sapiens
MDGMTELGCDSIEKLKAQIPKM

SEQ ID NO: 5015 - protein, 30 aa, Homo sapiens
VTPRRPFEKSRLDQELKLIGEYGFRNKREV

SEQ ID NO: 5016 - protein, 118 aa, Homo sapiens
MVSSHVERVFQIYEQHADTVGIDAVLQPSAVSPSVADMLEWLQDIERHYRKSKVPEEKVSSFVYPVGRLGKHTSFAQGLGPNFKRRTPRSCTRYPIECFLLPGRVRKLCVSGDHGYHS

SEQ ID NO: 5017 - protein, 71 aa, Homo sapiens
MVARLGRGSGRFAHPRAGGDWREAAVGCRALRRAWGVAVSVSELCSRRRGETREAIVATLRLLVSSQAVRP

SEQ ID NO: 5018 - protein, 359 aa, Homo sapiens
MAINRFRLENVTPEGDWQREWMGDGEGHFEGAVGSTMAPEERSGGSGWWEEARRNWFSVCPLSRRRRSLGRKGRMGGQVGCQGLPLTPSFPLFTLSSLPQDLEELALYQIQLLKDLRHTENEEDKVSSSSFRQRMLGNLLRPPYERPELPTCLYVIGLTGISGSGKSSIAQRLKGLGAFVIDSDHLGHRAYAPGGPAYQPVVEAFGTDILHKDGIINRKVLGSRVFGNKKQLKILTDIMWPIIAKLAREEMDRAVAEGKRVCVIDAAVLLEAGWQNLVHEVWTAVIPETEAVRRIVERDGLSEAAAQSRLQSQMSGQQLVEQSHVVLSTLWEPHITQRQVEKAWALLQKRIPKTHQALD

SEQ ID NO: 5019 - protein, 415 aa, Homo sapiens
MRELLCSEQGGPADALRSAALPPVPHRSFGWGFRSSPAHTPCGWGAWGRCNGRAWGQDRWEGRGWPASVPGGLTIGVEVTSGPAAHRAQGYHEGPALSSGVSECLGESRPGEDGGTGPALQECIVGTLPPPRPRREGRSLPQSGRCTHLGAPHPCPPERALPLSLGAWPGPPGGPSVSAPKDIRSVRPISLVRPVLPATLSHGIPWPVACRECFSGGVPTPWLICPRLAGDIRSTANLSRSQGRGTHLAFVSSPQALRTQAFQVLLQPLACVLKATVQAPGPPGLLDGTADDATTVDTLLASKSSCAGLLCRTLAHLEELQPLPQRPSPWPQASLLGATVTVLRLCDGSAAPASSVGGHLCGTLAGCVRVQRAALDFLGTLSQGTGPQELVTQALAVLLECLESPGSSPTVRWWG

SEQ ID NO: 5020 - protein, 207 aa, Homo sapiens
MKPVETHSLQMLHTILSTGSPLKAQSYEYVYRCIKSSILLGSISGGTDIISCFMGHNFSLPVYKGEIQARNLGMAVEAWNEEGKAVWGESGELVCTKPIPCQPTHFWNDENGNKYRKAYFSKFPGIWAHGDYCRINPKTGGIVMLGRSDGTLNPNGVRFGSSEIYNIVYAQRQESGSCRQTDHRWKSRGARRCFLEPRDPGSVPGHP

SEQ ID NO: 5021 - protein, 61 aa, Homo sapiens
MSLLLHPAPLGAASVIHALPGPSTHCCECASPEPVKRQLSILETQIIRALPCTEEKGSTRP

SEQ ID NO: 5022 - protein, 139 aa, Homo sapiens
MYENQQLGKLEPHVFALADVAYYTMLRKRVNQCIVISGESGSGKTQSTNFLIHCLTALSQKGYASGVERTILGAGPVLEVLRSQLVRMQLPLGKRVCYSQFPKEEDAMPWKATGGSTGTHQEAEGEREKGSGERQETLL

SEQ ID NO: 5023 - protein, 105 aa, Homo sapiens
MERKIHWNSWRASLSLESLFCYSLLLLLPFPTPSQAREICVKFTRGVDFNWQAQALLALQEAAEAFLVHLFEDAYLLTLHAGRVTLFPKDVQLARRIRGLEEGLG

SEQ ID NO: 5024 - protein, 115 aa, Homo sapiens
MQGSKARAKAKTHSSRAGLQFSVGRVHRLLRKGNYAKRVRAGAPVYLEAVLEYLTAKILELAGNAARDKKTRVTPRRLQLAIHDEKLNKLLGKVTIAQGGVLPNIQAVLLPCLYK

SEQ ID NO: 5025 - protein, 672 aa, Homo sapiens
MFPPSGSTGLIPPSHFQARPLSTLPRMAPTWLSDIPLVQPPGHQDVSERRLDTQRPQVTMWERDVSSDRQEPGRRGRSWGLEGSQALSQQAEVIVRQLQELRRLEEEVRLLRETSLQQKMRLEAQAMELEALARAEKAGRAEAEGLRAALAGAEVVRKNLEEGSQRELEEVQRLHQEQLSSLTQAHEEALSSLTSKAEGLEKSLSSLETRRAGEAKELAEAQREAELLRKQLSKTQEDLEAQVTLVENLRKYVGEQVPSEVHSQTWELERQKLLETMQHLQEDRDSLHATAELLQVRVQSLTHILALQEEELTRKVQPSDSLEPEFTRKCQSLLNRWREKVFALMVQLKAQELEHSDSVKQLKGQVASLQEKVTSQSQEQAILQRSLQDKAAEVEVERMGAKGLQLELSRAQEARRRWQQQTASAEEQLRLVVNAVSSSQIWLETTMAKVEGAAAQLPSLNNRLSYAVRKVHTIRGLIARKLALAQLRQESCPLPPPVTDVSLELQQLREERNRLDAELQLSARLIQQEVGRAREQGEAERQQLSKVAQQLEQELQQTQESLASLGLQLEVARQGQQESTEEAASLRQELTQQQELYGQGVEREMGASLGGWGGNCESKLLLICPVCTFTPALQEKVAEVETRLREQLSDTERRLNEARREHAKAGEPCQGG

SEQ ID NO: 5026 - protein, 40 aa, Homo sapiens
LGPNFKRRTPRSCTRYPIECFLLPGRVRKLCVSGDHGYHS

SEQ ID NO: 5027 - protein, 526 aa, Homo sapiens
LPDFARSDPRGCPPLRTPLAARARSAARPHRFTMLKALFLTMLTLALVKSQDTEETITYTQCTDGYEWDPVRQQCKDIDECDIVPDACKGGMKCVNHYGGYLCLPKTAQIIVNNEQPQQETQPAEGTSGATTGVVAASSMATSGVLPGGGFVASAAAVAGPEMQTGRNNFVIRRNPADPQRIPSNPSHRIQCAAGYEQSEHNVCQDIDECTAGTHNCRADQVCINLRGSFACQCPPGYQKRGEQCVDIDECTIPPYCHQRCVNTPGSFYCQCSPGFQLAANNYTCVDINECDASNQCAQQCYNILGSFICQCNQGYELSSDRLNCEDIDECRTSSYLCQYQCVNEPGKFSCMCPQGYQVVRSRTCQDINECETTNECREDEMCWNYHGGFRCYPRNPCQDPYILTPENRCVCPVSNAMCRELPQSIVYKYMSIRSDRSVPSDIFQIQATTIYANTINTFRIKSGNENGEFYLRQTSPVSAMLVLVKSLSGPREHIVDLEMLTVSSIGTFRTSSVLRLTIIVGPFSF

SEQ ID NO: 5028 - protein, 148 aa, Homo sapiens
MTRKLRRRPNDPVPIPDKRRKPAPAQLNYLLTDEQIMEDLRTLNKLKSPKRPASPSSPEHLPATPAESPAQRFEARIEDGKLHYDKRWYHKSQAIYLESKDNQKLSCVISSVGANEIWVRKTSDSTKMRIYLGQLQRGLFVIHRRSAA

SEQ ID NO: 5029 - protein, 17 aa, Homo sapiens
MMWRKTTAVSNLVSRAW

SEQ ID NO: 5030 - protein, 64 aa, Homo sapiens
TEVAAVGGGGVEGRGAQARTNPHVPGRDPDPAAYREAKPAGWAAEPESGTVWSPLELRSGCSAS

SEQ ID NO: 5031 - protein, 239 aa, Homo sapiens
VRDATAATRLAAFLGATPPGDPTRRASSAAPIPLGLLGAALSSVTLYTRKLAGTMGKKQNKKKVEEVLEEEEEEYVVEKVLDRRVVKGKVEYLLKWKGFSDEDNTWEPEENLDCPDLIAEFLQSQKTAHETDKSEGGKRKADSDSEDKGEESKPKKKKEESEKPRGFARGLEPERIIGATDSSGELMFLMKWKNSDEADLVPAKEANVKCPQVVISFYEERLTWHSYPSEDDDKKDDKN

SEQ ID NO: 5032 - protein, 31 aa, Homo sapiens
MFSSTSTPSSFTAFQTTMRSSIPHWRISRMC

SEQ ID NO: 5033 - protein, 218 aa, Homo sapiens
MAPRTLLLLLSGALALTLTQTWARSHSMRYFYTTMSRPGRGEPRFISVGYVDDTQFVRFDSDDASPREEPRAPWMEREGPEYWDRNTQICKAQAQTERENLRIALRYYNQSEGGSHTMQVMYGCDVGPDGRFLRGYEQHAYDGKDYIALNEDLRSWTAADMAAQITKRKWEAARRAEQLRAYLEGEFVEWLRRYLENGKETLQRADPPQDTYDPPPHL

SEQ ID NO: 5034 - protein, 197 aa, Homo sapiens [sequence omitted]

SEQ ID NO: 5035 - protein, 146 aa, Homo sapiens
VYKGEIQARNLGMAVEAWNEEGKAVWGESGELVCTKPIPCQPTHFWNDENGNKYRKAYFSKFPGIWAHGDYCRINPKTGGIVMLGRSDGTLNPNGVRFGSSEIYNIVYAQRQESGSCRQTDHRWKSRGARRCFLEPRDPGSVPGHP

SEQ ID NO: 5036 - protein, 35 aa, Homo sapiens
VPSVTEKCCGITSKASPNRPFGALLGVVGLSEFPV

SEQ ID NO: 5037 - protein, 53 aa, Homo sapiens
LACGTPDRRGCAFPAPGPSRHTRSSPLARANAQDDHHPRVCHHLRLERSFMQG

SEQ ID NO: 5038 - protein, 329 aa, Homo sapiens
IGYNIIWVPMASCDFSIRTYTYADTPDDFQLHNFSLPEEDTKLKIPLIHRALQLAQRPVSLLASPWTSPTRLKTRGAGNGKGPLKGQPRDIYHQTWARYIVKFLDAYAEHKLQFWAVTAENEPSAGLLSGYPFQCLGFTPEHQRDFIARDLGPTLANGTHHNVRLLMLDDQRLLLPHWAKVVLTDPEAAKGLCGFQVLGAECAARLLGSRDAVQPQHHHKPPVPCGRLDRLEPIIVDITKHTFYKQPMFYHLGHFSKFIPEGSQRVGLVASQKNDPDAVALMHPDGSAVVVVLNRSSKDVPLTIKDPAVGFLETISPGYSIHTYLWRRQ

SEQ ID NO: 5039 - protein, 1235 aa, Homo sapiens
LAWTMVLLWEPAGAWLALGLALALGPSVAAAAPRQDCTGVECPPLENCIEEALEPGACCATCVQQGCACEGYQYYDCLQGGFVRGRVPAGQSYFVDFGSTECSCPPGGGKISCQFMLCPELPPNCIEAVVVADSCPQCGQVGCVHAGHKYAAGHTVHLPPCRACHCPDAGGELICYQLPGCHGNFSDAEEGDPERHYEDPYSYDQEVAEVEAATALGGEVQAGAVQAGAGGPPAALGGGSQPLSTIQAPPWPAVLPRPTAAAALGPPAPVQAKARRVTEDSEEEEEEEEEREEMAVTEQLAAGGHRGLDGLPTTAPAGPSLPIQEERAEAGARAEAGARPEENLILDAQATSRSTGPEGVTHAPSLGKAALVPTQAVPGSPRDPVKPSPHNILSTSLPDAAWIPPTREVPRKPQVLPHSHVEEDTDPNSVHSIPRSSPEGSTKDLIETCCAAGQQWAIDNDECLEIPESGTEDNVCRTAQRHCCVSYLQEKSCMAGVLGAKEGETCGAEDNDSCGISLYKQCCDCCGLGLRVRAEGQSCESNPNLGYPCNHVMLSCCEGEEPLIVPEVRRPPEPAAAPRRVSEAEMAGREALSLGTEAELPNSLPGDDQDECLLLPGELCQHLCINTVGSYHCACFPGFSLQDDGRTCRPEGHPPQPEAPQEPALKSEFSQVASNTIPLPLPQPNTCKDNGPCKQVCSTVGGSAICSCFPGYAIMADGVSCEDQDECLMGAHDCSRRQFCVNTLGSFYCVNHTVLCADGYILNAHRKCVDINECVTDLHTCSRGEHCVNTLGSFHCYKALTCEPGYALKDGECEDVDECAMGTHTCQPGFLCQNTKGSFYCQARQRCMDGFLQDPEGNCVDINECTSLSEPCRPGFSCINTVGSYTCQRNPLICARGYHASDDGTKCVDVNECETGVHRCGEGQVCHNLPGSYRCDCKAGFQRDAFGRGCIDVNECWASPGRLCQHTCENTLGSYRCSCASGFLLAADGKRCEDVNECEAQRCSQECANIYGSYQCYCRQGYQLAEDGHTCTDIDECAQGAGILCTFRCLNVPGSYQCACPEQGYTMTANGRSCKDVDECALGTHNCSEAETCHNIQGSFRCLRFECPPNYVQVSKTKCERTTCHDFLECQNSPARITHYQLNFQTGLLVPAHIFRIGPAPAFTGDTIALNIIKGNEEGYFGTRRLNAYTGVVYLQRAVLEPRDFALDVEMKLWRQGSVTTFLAKMHIFFTTFAL

SEQ ID NO: 5040 - protein, 41 aa, Homo sapiens
IIAWMFRAAIQCEFSKQEFMDGMTELGCDSIEKLKAQIPKM

SEQ ID NO: 5041 - protein, 30 aa, Homo sapiens
MDPRKVNELQAFVKMCKQDPSVLHTEEMRF

SEQ ID NO: 5042 - protein, 8 aa, Homo sapiens
MMVHFFKQ

SEQ ID NO: 5043 - protein, 39 aa, Homo sapiens
MPPTQLSHCKKTFTVQTTKLAVEETVVRFPCKFTYENGL

SEQ ID NO: 5044 - protein, 351 aa, Homo sapiens
MRAENGPSEPSQKGKAQSSTLLLHIPPYCSNPRSSGTMEDKRNIQIIEWEHLDKKKFYVFGVAMTMMIRVSVYPFTLIRTRLQVQKGKSLYHGTFDAFIKILRADGITGLYRGFLVNTFTLISGQCYVTTYELTRKFVADYSQSNTVKSLVAGGSASLVAQSITVPIDVVSQHLMMQRKGEKMGRFQVRGNPEGQGVVAFGQTKDIIRQILQADGLRGFYRGYVASLLTYIPNSAVWWPFYHFYAEQLSYLCPKECPHIVFQAVSGPLAAATASILTNPMDVIRTRVQVEGKNSIILTFRQLMAEEGPWGLMKGLSARIISATPSTIVIVVGYESLKKLSLRPELVDSRHW

SEQ ID NO: 5045 - protein, 242 aa, Homo sapiens
VLWTTAQQCPALCLGLGPSCTCCLDPRPAWAWALVLPMTPPERLFLPRVCGTTLHLLLLGLLLVLLPGAQGLPGVGLTPSAAQTARQHPKMHLAHSTLKPAAHLIGDPSKQNSLLWRANTDRAFLQDGFSLSNNSLLVPTSGIYFVYSQVVFSGKAYSPKATSSPLYLAHEVQLFSSQYPFHVPLLSSQKMVYPGLQEPWLHSMYHGAAFQLTQGDQLSTHTDGIPHLVLSPSTVFFGAFAL

SEQ ID NO: 5046 - protein, 39 aa, Homo sapiens
TQNLLFRFRAYSLLAVSCHHVGNRSCRDSHPSAGGEIPG

SEQ ID NO: 5047 - protein, 56 aa, Homo sapiens
RHRLTERACGTCAATTTRARPGLTPSRACTAATWGRTGASSAGMTSTPTTARITSP

SEQ ID NO: 5048 - protein, 37 aa, Homo sapiens
VTKYLNRRGLRRDLNSSCPTNSISAFLLTSCENYSSG

SEQ ID NO: 5049 - protein, 273 aa, Homo sapiens
VQLGRPQPLVTRVMLFLALGSPWAVELPLCGRRTALCAAAALRGPRASVSRASSSSGPSGPVAGWSTGPSGAARLLRRPGRAQIPVYWEGYVRFLNTPSDKSEDGRLIYTGNMARAVFGVKCFSYSTSLIGLTFLPYIFTQNNAISESVPLPIQIIFYGIMGSFTVITPVLLHFITKGYVIRLYHEATTDTYKAITYNAMLAETSTVFHQNDVKIPDAKHVFTTFYAKTKSLLVNPVLFPNREDYIHLMGYDKEEFILYMEETSEEKRHKDDK

SEQ ID NO: 5050 - protein, 285 aa, Homo sapiens
MSHRKFSTPRHGSLGFLPWKRSSRHRGKVKSFPKDDPSKPVHLTAFLGYKAGMTHIVREVDRPGSKVNKKEVVEAVTIVERPPVGIVGCVETPQGFRTCKTVFAEHISDECKRHFYKNWHKSKKKAFTKYCKKWQDEDGKKQLEKDFSSMKKYCQVICVIAHTQMQLLPLCQKKAHLMEIQVNGGTVAEKLDWAGERLKHQVPVNQVFGQDEMIDVIRVTKGKGYKRVTSRWHTKKLPRKTHQGLCKVACIGAWHPARVGFSVVRGGQKGYHHRTEINKKIYRIG

SEQ ID NO: 5051 - protein, 102 aa, Homo sapiens
IGYNIIWVPMASCDFSIRTYTYADTPDDFQLHNFSLPEEDTKLKIPLIHRALQLAQRPVSLLASPWTSPTRLKTRGAGNGKGPLKGQPRDIYHQTWARYIVK

SEQ ID NO: 5052 - protein, 226 aa, Homo sapiens
LIHRALQLAQRPVSLLASPWTSPTRLKTRGAGNGKGPLKGQPRDIYHQTWARYIVKFLDAYAEHKLQFWAVTAENEPSAGLLSGYPFQCLGFTPEHQRDFIARDLGPTLANGTHHNVRLLMLDDQRLLLPHWAKVVLTDPEAAKYVHGIAVHWYLDFLAPAKATLRETHHLFPNTMLFASEACVGSKFWEQSVRLGSWDRGMQYSHSIITNLLYHVVGWTDWNPSL

SEQ ID NO: 5053 - protein, 6 aa, Homo sapiens
MDGPFI

SEQ ID NO: 5054 - protein, 372 aa, Homo sapiens
RSLRRYGELANTPFGLFLPPCFCVPWECCCAYASGLFLELQWTGICDSTMGLSNILFVMAFLLSGAAPLKIQAYFNETADLPCQFANSQNQSLSELVVFWQDQENLVLNEVYLGKEKFDSVHSKYMGRTSFDSDSWTLRLHNLQIKDKGLYQCIIHHKKPTGMIRIHQMNSELSVLANFSQPEIVPISNITENVYINLTCSSIHGYPEPKKMSVLLRTKNSTIEYDGVMQKSQDNVTELYDVSISLSVSFPDVTSNMTIFCILETDKTRLLSSPFSIELEDPQPPPDHIPWITAVLPTVIICVMVFCLILWKWKKKKRPRNSYKCGTNTMEREESEQTKKREKIHIPERSDEAQRVFKSSKTSSCDKSDTCF

SEQ ID NO: 5055 - protein, 137 aa, Homo sapiens
RASAPMLLRMSEHRNEALGNYLEMRLKSSFLRGLGSWKSNPLRLGGWTILLTLTMGQGEPGGPQGDPWVPHELLLPSLCDSSHASSWGSGSITCAWRGGDSSSHPLVSGHILSNSPVAAVMCSSMGTHLSPFKGTLL

SEQ ID NO: 5056 - protein, 42 aa, Homo sapiens
LIIAWMFRAAIQCEFSKQEFMDGMTELGCDSIEKLKAQIPKM

SEQ ID NO: 5057 - protein, 33 aa, Homo sapiens
LNRRGLRRDLNSSCPTNSISAFLLTSCENYSSG

SEQ ID NO: 5058 - protein, 25 aa, Homo sapiens
VSANPASLCGGLCHRAMGPEVPGPG

SEQ ID NO: 5059 - protein, 15 aa, Homo sapiens
VDSCSWGVRSRSSPA

SEQ ID NO: 5060 - protein, 62 aa, Homo sapiens
VAAVGGGGVEGRGAQARTNPHVPGRDPDPAAYREAKPAGWAAEPESGTVWSPLELRSGCSAS

SEQ ID NO: 5061 - protein, 27 aa, Homo sapiens
LARANAQDDHHPRVCHHLRLERSFMQG

SEQ ID NO: 5062 - protein, 580 aa, Homo sapiens
IMSDPAVNAQLDGIISDFEALKRSFEVEEVETPNSTPPRRVQTPLLRATVASSTQKFQDLGVKNSEPSARHVDSLSQRSPKASLRRVELSGPKAAEPVSRRTELSIDISSKQVENAGAIGPSRFGLKRAEVLGHKTPEPAPRRTEITIVKPQESAHRRMEPPASKVPEVPTAPATDAAPKRVEIQMPKPAEAPTAPSPAQTLENSEPAPVSQLQSRLEPKPQPPVAEATPRSQEATEAAPSCVGDMADTPRDAGLKQAPASRNEKAPVDFGYVGIDSILEQMRRKAMKQGFEFNIMVVGQSGLGKSTLINTLFKSKISRKSVQPTSEERIPKTIEIKSITHDIEEKGVRMKLTVIDTPGFGDHINNENCWQPIMKFINDQYEKYLQEEVNINRKKRIPDTRVHCCLYFIPATGHSLRPLDIEFMKRLSKVVNIVPVIAKADTLTLEERVHFKQRITADLLSNGIDVYPQKEFDEDSEDRLVNEKFREMIPFAVVGSDHEYQVNGKRILGRKTKWGTIEVENTTHCEFAYLRDLLIRTHMQNIKDITSSIHFEAYRVKRLNEGSSAMANGMEEKEPEAPEM

SEQ ID NO: 5063 - protein, 114 aa, Homo sapiens
MRAGKGKMRNRHCIQCTGPYIIYNEDNGIIKAFRNIPGITLLNVSKLNILKLAPGGHVGLFCIWTKSAFQKLDEFNGTWRKASSLKSNYNLPIHKMINTDLSRILKSPEIQRAL

SEQ ID NO: 5064 - protein, 558 aa, Homo sapiens
MALQLINCPDYKLRPYQHSYLRSTVILVLTLLMICLMIGMAHVLVVYRVLASALFSSSAVPFLEEQVTTAVVVTGALVHYVTIIIMTKINRCVALKLCDFEMPRTFSERESRFTIRFFTLQFFTHFSSLIYIAFILGRINGHPGKSTRLAGLWKLEECHASGCMMDLFVQMAIIMGLKQTLSNCVEYLVPWVTHKCRSLRASESGHLPRDPELRDWRRNYLLNPVNTFSLFDEFMEMMIQYGFTTIFVAAFPLAPLLALFSNLVEIRLDAIKMVWLQRRLVPRKAKDIGQTGRAQDGRELGGLRPVGFPLARPAHLEKIISRISGRRQPPALLRRPRMRVEPGWEGTRSGRGRALCRLLPQTVRISEGLDAPKGDPGSASGWGWNRAAGLCPKTGHAETDRQQGSDGSWGAGCGERERGVREAPSLGPRLQGLTLGWEPRRWSGWGAQLRSSGRWRMRIPRFLPVHVRVRGAGAQRPCSAMAGDFLVNTAALGLQGDTTHRDTAGPVLAGGGGEGRTSRGTLSQTACPLLWCRDLAAGAGDHRCAGGHCQWDGHCLHI

SEQ ID NO: 5065 - protein, 249 aa, Homo sapiens [sequence omitted]

SEQ ID NO: 5066 - protein, 128 aa, Homo sapiens
MSEHRNEALGNYLEMRLKSSFLRGLGSWKSNPLRLGGWTILLTLTMGQGEPGGPQGDPWVPHELLLPSLCDSSHASSWGSGSITCAWRGGDSSSHPLVSGHILSNSPVAAVMCSSMGTHLSPFKGTLL

SEQ ID NO: 5067 - protein, 320 aa, Homo sapiens
MASCDFSIRTYTYADTPDDFQLHNFSLPEEDTKLKIPLIHRALQLAQRPVSLLASPWTSPTRLKTRGAGNGKGPLKGQPRDIYHQTWARYIVKFLDAYAEHKLQFWAVTAENEPSAGLLSGYPFQCLGFTPEHQRDFIARDLGPTLANGTHHNVRLLMLDDQRLLLPHWAKVVLTDPEAAKGLCGFQVLGAECAARLLGSRDAVQPQHHHKPPVPCGRLDRLEPIIVDITKHTFYKQPMFYHLGHFSKFIPEGSQRVGLVASQKNDPDAVALMHPDGSAVVVVLNRSSKDVPLTIKDPAVGFLETISPGYSIHTYLWRRQ

SEQ ID NO: 5068 - protein, 27 aa, Homo sapiens
LCAIHAKRLTIMPKEIQLARRIQGKRA

SEQ ID NO: 5069 - protein, 17 aa, Homo sapiens
VAVKAVAATMMEKRNLH

SEQ ID NO: 5070 - protein, 16 aa, Homo sapiens
MWRKTTAVSNLVSRAW

SEQ ID NO: 5071 - protein, 20 aa, Homo sapiens
MLEVPGSCGPWQVMCESRVS

SEQ ID NO: 5072 - protein, 27 aa, Homo sapiens
RRDLNSSCPTNSISAFLLTSCENYSSG

SEQ ID NO: 5073 - protein, 272 aa, Homo sapiens
LTTTAFPFVSVMSWKKALRIPGDLRVATVTLMLAMLSSLLAEGRDSPEDFVFQFKGMCYFTNGTERVRLVTRYIYNREEYARFDSDVGVYRAVTPQGRPDAEYWNSQKEVLEGTRAELDTVCRHNYEVAFRGILQRRVEPTVTISPSRTEALNHHNLLVCSVTDFYPGQIKVRWFRNDQEETAGVVSTPLIRNGDWTFQILVMLEMTPQRGDVYTCHVEHPSLQSPITVEWRAQSESAQSKMLSGVGGFVLGLIFLGLGLIIRQRSQKGLLH

SEQ ID NO: 5074 - protein, 245 aa, Homo sapiens
LRYAASVRDATAATRLAAFLGATPPGDPTRRASSAAPIPLGLLGAALSSVTLYTRKLAGTMGKKQNKKKVEEVLEEEEEEYVVEKVLDRRVVKGKVEYLLKWKGFSDEDNTWEPEENLDCPDLIAEFLQSQKTAHETDKSEGGKRKADSDSEDKGEESKPKKKKEESEKPRGFARGLEPERIIGATDSSGELMFLMKWKNSDEADLVPAKEANVKCPQVVISFYEERLTWHSYPSEDDDKKDDKN

SEQ ID NO: 5075 - protein, 58 aa, Homo sapiens
LVPFPPAPSADLSRRPLPSHRPTQDPGLVTGQCDASRLPRGQRGTHRAWAAPEATRPG

SEQ ID NO: 5076 - protein, 86 aa, Homo sapiens
IRTYTYADTPDDFQLHNFSLPEEDTKLKIPLIHRALQLAQRPVSLLASPWTSPTRLKTRGAGNGKGPLKGQPRDIYHQTWARYIVK

SEQ ID NO: 5077 - protein, 60 aa, Homo sapiens
LCDSSHASSWGSGSITCAWRGGDSSSHPLVSGHILSNSPVAAVMCSSMGTHLSPFKGTLL

SEQ ID NO: 5078 - protein, 708 aa, Homo sapiens
RSCCDSPLPFSRVTPVVPRLPRANLCGCRHRRVEFPASGRTELFSRIQCSVSSPQSQSGADREQGTGMAKAAAIGIDLGTTYSCVGVFQHGKVEIIANDQGNRTTPSYVAFTDTERLIGDAAKNQVALNPQNTVFDAKRLIGRKFGDPVVQSDMKHWPFQVINDGDKPKVQVSYKGETKAFYPEEISSMVLTKMKEIAEAYLGYPVTNAVITVPAYFNDSQRQATKDAGVIAGLNVLRIINEPTAAAIAYGLDRTGKGERNVLIFDLGGGTFDVSILTIDDGIFEVKATAGDTHLGGEDFDNRLVNHFVEEFKRKHKKDISQNKRAVRRLRTACERAKRTLSSSTQASLEIDSLFEGIDFYTSITRARFEELCSDLFRSTLEPVEKALRDAKLDKAQIHDLVLVGGSTRIPKVQKLLQDFFNGRDLNKSINPDEAVAYGAAVQAAILMGDKSENVQDLLLLDVAPLSLGLETAGGVMTALIKRNSTIPTKQTQIFTTYSDNQPGVLIQVYEGERAMTKDNNLLGRFELSGIPPAPRGVPQIEVTFDIDANGILNVTATDKSTGKANKITITNDKGRLSKEEIERMVQEAEKYKAEDEVQRERVSAKNALESYAFNMKSAVEDEGLKGKISEADKKKVLDKCQEVISWLDANTLAEKDEFEHKRKELEQVCNPIISGLYQGAGGPGPGGFGAQGPKGGSGSGPTIEEVD

SEQ ID NO: 5079 - protein, 243 aa, Homo sapiens
MEAMGTEATRRQQATVTFSQTATAIMILGLPRASKSQFYSNGGHSGNASGGGGGGGGGSSGYGSYYQGDNYNSPVPPKHAGKKQPHGGQQKPSYGSGYQSHQGQQQSYNQSPYSNYGPPQGKQKGYNHGQGSYSYSNSYNSPGGGGGSDYNYESKFNYSGSGGRSGGNSYGSGGASYNPGSHGGYGGGSGGGSSYQGKQGGYSQSNYNSPGSGQNYSGPPSSYQSSQGGYGRNADHSMNYQYR

SEQ ID NO: 5080 - protein, 696 aa, Homo sapiens
VTPVVPRLPRANLCGCRHRRVEFPASGRTELFSRIQCSVSSPQSQSGADREQGTGMAKAAAIGIDLGTTYSCVGVFQHGKVEIIANDQGNRTTPSYVAFTDTERLIGDAAKNQVALNPQNTVFDAKRLIGRKFGDPVVQSDMKHWPFQVINDGDKPKVQVSYKGETKAFYPEEISSMVLTKMKEIAEAYLGYPVTNAVITVPAYFNDSQRQATKDAGVIAGLNVLRIINEPTAAAIAYGLDRTGKGERNVLIFDLGGGTFDVSILTIDDGIFEVKATAGDTHLGGEDFDNRLVNHFVEEFKRKHKKDISQNKRAVRRLRTACERAKRTLSSSTQASLEIDSLFEGIDFYTSITRARFEELCSDLFRSTLEPVEKALRDAKLDKAQIHDLVLVGGSTRIPKVQKLLQDFFNGRDLNKSINPDEAVAYGAAVQAAILMGDKSENVQDLLLLDVAPLSLGLETAGGVMTALIKRNSTIPTKQTQIFTTYSDNQPGVLIQVYEGERAMTKDNNLLGRFELSGIPPAPRGVPQIEVTFDIDANGILNVTATDKSTGKANKITITNDKGRLSKEEIERMVQEAEKYKAEDEVQRERVSAKNALESYAFNMKSAVEDEGLKGKISEADKKKVLDKCQEVISWLDANTLAEKDEFEHKRKELEQVCNPIISGLYQGAGGPGPGGFGAQGPKGGSGSGPTIEEVD

SEQ ID NO: 5081 - protein, 41 aa, Homo sapiens
LAPWPPRDPDISSSSICPLSSGRQAFDARGPWQLWSLASDV

SEQ ID NO: 5082 - protein, 21 aa, Homo sapiens
LMLEVPGSCGPWQVMCESRVS

SEQ ID NO: 5083 - protein, 73 aa, Homo sapiens
MGTRRHAAGWAERGGRLQGPRARVKRGLGAGLAGLALPAPLRPRRPGNAHLGLRRLRWEDWSPSRASPPAPEH

SEQ ID NO: 5084 - protein, 347 aa, Homo sapiens
MESESESGAAADTPPLETLSFHGDEEIIEVVELDPGPPDPDDLAQEMEDVDFEEEEEEEGNEEGWVLEPQEGVVGSMEGPDDSEVTFALHSASVFCVSLDPKTNTLAVTGGEDDKAFVWRLSDGELLFECAGHKDSVTCAGFSHDSTLVATGDMSGLLKVWQVDTKEEVWSFEAGDLEWMEWHPRAPVLLAGTADGNTWMWKVPNGDCKTFQGPNCPATCGRVLPDGKRAVVGYEDGTIRIWDLKQGSPIHVLKGTEGHQGPLTCVAANQDGSLILTGSVDCQAKLVSATTGKVSGPGARLGPPLSRLLSFLPGSSLSPLPTVFLSIKHPDSVSSSDPLWLSGGGCF

SEQ ID NO: 5085 - protein, 32 aa, Homo sapiens
IQCEFSKQEFMDGMTELGCDSIEKLKAQIPKM

SEQ ID NO: 5086 - protein, 24 aa, Homo sapiens
LNSSCPTNSISAFLLTSCENYSSG

SEQ ID NO: 5087 - protein, 130 aa, Homo sapiens
LRMSEHRNEALGNYLEMRLKSSFLRGLGSWKSNPLRLGGWTILLTLTMGQGEPGGPQGDPWVPHELLLPSLCDSSHASSWGSGSITCAWRGGDSSSHPLVSGHILSNSPVAAVMCSSMGTHLSPFKGTLL

SEQ ID NO: 5088 - protein, 22 aa, Homo sapiens
RRFPALTNSSSPRPSAQETPSK

SEQ ID NO: 5089 - protein, 233 aa, Homo sapiens
MTHIVREVDRPGSKVNKKEVVEAVTIVERPPVGIVGCVETPQGFRTCKTVFAEHISDECKRHFYKNWHKSKKKAFTKYCKKWQDEDGKKQLEKDFSSMKKYCQVICVIAHTQMQLLPLCQKKAHLMEIQVNGGTVAEKLDWAGERLKHQVPVNQVFGQDEMIDVIRVTKGKGYKRVTSRWHTKKLPRKTHQGLCKVACIGAWHPARVGFSVVRGGQKGYHHRTEINKKIYRIG

SEQ ID NO: 5090 - protein, 91 aa, Homo sapiens
MQDWQELRCSHLPRRPPFHIQQRRRGQPLRRFFTRLRPGHAQVHVHFSGYQVATYLKWCESYSFGTVVDFQIGKSKGPKRQLTGDHALGFS

SEQ ID NO: 5091 - protein, 21 aa, Homo sapiens
VAAVMCSSMGTHLSPFKGTLL

SEQ ID NO: 5092 - protein, 72 aa, Homo sapiens
MAQSGGAAFWGSALGLQTQGAEMLAAGPPTRARQPALPGELRGAEVPGEAAPGARALPDLGNRQSGAPGSKS

SEQ ID NO: 5093 - protein, 114 aa, Homo sapiens
MEIDKHSLNIGDYNRTVGKGPGSRPQISKESSMERNPYFDKNGNPSMFGVGNTAAQPRGMQQPPAQPLSSSQPNLRAQVPPPLLSPQVNKLSLHSPVYLQKGSCMILYLNKMAN

SEQ ID NO: 5094 - protein, 62 aa, Homo sapiens [sequence omitted]

SEQ ID NO: 5095 - protein, 93 aa, Homo sapiens
ILLTPSTSPLARPECEEKGPARPASCVRRTPGGPTGRVGPGLARRVCEDRGPVLPGRRASGGEGPGPARPVREDWGPGPAPPPPPPPRWPSSR

SEQ ID NO: 5096 - protein, 38 aa, Homo sapiens
LHYLMRNLATKPLILSQRFGRNCFLSGSPEYPEESVWN

SEQ ID NO: 5097 - protein, 24 aa, Homo sapiens
IMLLSNTCSQSPKGLYFFSVLNVI

SEQ ID NO: 5098 - protein, 14 aa, Homo sapiens
IFSGRSYWNSPTRP

SEQ ID NO: 5099 - protein, 46 aa, Homo sapiens
RRGCAFPAPGPSRHTRSSPLARANAQDDHHPRVCHHLRLERSFMQG

SEQ ID NO: 5100 - protein, 37 aa, Homo sapiens
VVVYSSVELRAPWTSQVFRVFHLELYKVQKTWSLIPS

SEQ ID NO: 5101 - protein, 71 aa, Homo sapiens
IRAFRGSRALRAPPYPRGWRAAPEAPARLAVPRLPARASYSTRALNLSVTQALSPESLASWFKRNGRKGAM

SEQ ID NO: 5102 - protein, 252 aa, Homo sapiens
MAEGTSPQRRSVLPRVPEKQRGSASEPWPGSTAARLCQPLQLCFLLPGNGIDVTLGRGCCCFWKTWRHRALCPWAIFSARPSSESWCSPQIKESEGVVNDELPNCWECPKCNHAGKTGKQKRGPGFKYASNLPGSLLKEQKMNRDNKEGQEPAKRRSECEEAPRRRSDEHSKKVPPDGLLRRKSDDVHLRKKRKYEKPQELSGRKRASSLQTSPGSSSHLSPRPPLGSSLSPWWRSSLTYFQQQVLPRRTPS

SEQ ID NO: 5103 - protein, 43 aa, Homo sapiens [sequence omitted]

SEQ ID NO: 5104 - protein, 120 aa, Homo sapiens
MLQDKRMEIDKHSLNIGDYNRTVGKGPGSRPQISKESSMERNPYFDKNGNPSMFGVGNTAAQPRGMQQPPAQPLSSSQPNLRAQVPPPLLSPQVNKLSLHSPVYLQKGSCMILYLNKMAN

SEQ ID NO: 5105 - protein, 30 aa, Homo sapiens
MEPHPLPPLGIWTHVFFLLRLQNCRDVFDF

SEQ ID NO: 5106 - protein, 17 aa, Homo sapiens
LLMWVNLSLIQLLPYID

SEQ ID NO: 5107 - protein, 227 aa, Homo sapiens
LSRGRGAGGMALVPYEETTEFGLQKFHKPLATFSFANHTIQIRQDWRHLGVAAVVWDAAIVLSTYLEMGAVELRGRSAVELGAGTGLVGIVAALLGAHVTITDRKVALEFLKSNVQANLPPHIQTKTVVKELTWGQNLGSFSPGEFDLILGADIIYLEETFTDLLQTLEHLCSNHSVILLACRIRYERDNNFLAMLERQFTVRKVHYDPEKDVHIYEAQKRNQKEDL

SEQ ID NO: 5108 - protein, 12 aa, Homo sapiens
VAATMMEKRNLH

SEQ ID NO: 5109 - protein, 4 aa, Homo sapiens
MACS

SEQ ID NO: 5110 - protein, 100 aa, Homo sapiens
TATSGWPRGALARLFLRPRGPRSPIIQFRRVTGAAVASQGAGSLSPALLPLAPSPRPRRAGLRGQGPSGEGYHLTWKKMSSLEKKHSNVIVQNSLNIHNR

SEQ ID NO: 5111 - protein, 145 aa, Homo sapiens
KLRRRPNDPVPIPDKRRKPAPAQLNYLLTDEQIMEDLRTLNKLKSPKRPASPSSPEHLPATPAESPAQRFEARIEDGKLHYDKRWYHKSQAIYLESKDNQKLSCVISSVGANEIWVRKTSDSTKMRIYLGQLQRGLFVIHRRSAA

SEQ ID NO: 5112 - protein, 19 aa, Homo sapiens
LAPRLLPSLRAQSPFGRAS

SEQ ID NO: 5113 - protein, 32 aa, Homo sapiens
VWDSRQERLRLPRTGTFATHQILAPGSRERTG

SEQ ID NO: 5114 - protein, 46 aa, Homo sapiens
RKRQKCVFHLEHPEGAQPYQHLDFDPVTLILDLWPPELLENKFALF

SEQ ID NO: 5115 - protein, 558 aa, Homo sapiens
RHTQGLGRAGGHTAWLSCSWSPASPRRPGGSISQEARSPPGGWAQPRQMDEKTKKAEEMALSLTRAVAGGDEQVAMKCAIWLAEQRVPLSVQLKPEVSPTQDIRLWVSVEDAQMHTVTIWLTVRPDMTVASLKDMVFLDYGFPPVLQQWVIGQRLARDQETLHSHGVRQNGDSAYLYLLSARNTSLNPQELQRERQLRMLEDLGFKDLTLQPRGPLEPGPPKPGVPQEPGRGQPDAVPEPPPVGWQCPGCTFINKPTRPGCEMCCRARPEAYQVPASYQPDEEERARLAGEEEALRQYQQRKQQQQEGNYLQHVQLDQRSLVLNTEPAECPVCYSVLAPGEAVVLRECLHTFCRECLQGTIRNSQEAEVSCPFIDNTYSCSGKLLEREIKALLTPEDYQRFLDLGISIAENRSAFSYHCKTPDCKGWCFFEDDVNEFTCPVCFHVNCLLCKAIHEQMNCKEYQEDLALRAQNDVAARQTTEMLKVMLQQGEAMRCPQCQIVVQKKDGCDWIRCTVCHTEICWVTKGPRWGPGGPGDTSGGCRCRVNGIPCHPSCQNCH

SEQ ID NO: 5116 - protein, 107 aa, Homo sapiens
MRNRHCIQCTGPYIIYNEDNGIIKAFRNIPGITLLNVSKLNILKLAPGGHVGLFCIWTKSAFQKLDEFNGTWRKASSLKSNYNLPIHKMINTDLSRILKSPEIQRAL

SEQ ID NO: 5117 - protein, 67 aa, Homo sapiens
MWQRPEPGERLVRKRLRRNLESAGVSRQNPFGQGEGERGKGLVLLFKQEEDYKPPSTICQVILNQST

SEQ ID NO: 5118 - protein, 93 aa, Homo sapiens
MASCDFSIRTYTYADTPDDFQLHNFSLPEEDTKLKIPLIHRALQLAQRPVSLLASPWTSPTRLKTRGAGNGKGPLKGQPRDIYHQTWARYIVK

SEQ ID NO: 5119 - protein, 15 aa, Homo sapiens
MWVNLSLIQLLPYID

SEQ ID NO: 5120 - protein, 153 aa, Homo sapiens
RHTQGLGRAGGHTAWLSCSWSPASPRRPGGSISQEARSPPGGWAQPRQMDEKTKKAEEMALSLTRAVAGGDEQVAMKCAIWLAEQRVPLSVQLKPEVSPTQDIRFLMVQNGHSSSIQPSHHRRKGRKTPLHTLLKSIAQKLYTLLPLIPVDQN

SEQ ID NO: 5121 - protein, 34 aa, Homo sapiens
MCTKVYVQRGSEITFARAKTLRPMRVFINRRMVK

SEQ ID NO: 5122 - protein, 29 aa, Homo sapiens
MKDFSRTQGHTLEVLQLKGGTPWPPQPIT

SEQ ID NO: 5123 - protein, 25 aa, Homo sapiens
MSLLLLRGARHLVTCHFRICVNQTI

SEQ ID NO: 5124 - protein, 46 aa, Homo sapiens
MCYYWGGWSSKKRRRKKRAGLCWQRLSAGLTCGGDGRTYGVRLQVF

SEQ ID NO: 5125 - protein, 27 aa, Homo sapiens
MDRRGGGRGGGGGGGRPGGLEPNRQYL

SEQ ID NO: 5126 - protein, 110 aa, Homo sapiens
MLPCASCLPGSLLLWALLLLLLGSASPQDSEEPDSYTECTDGYEWDPDSQHCRGVCAWGTKHPQEPGKGLIAAFQGTAPPPRTAVGAQQPVLCPALLHRGQLWLSGGQLS

SEQ ID NO: 5127 - protein, 42 aa, Homo sapiens
MPYCYLAGSTTGQKNENCRYLFCVFLSRMVDVRDPTKDLWTH

SEQ ID NO: 5128 - protein, 163 aa, Homo sapiens [sequence omitted]

SEQ ID NO: 5129 - protein, 76 aa, Homo sapiens
MVVWKYLKEWKPGSKEGAETLPTLLPAPQPGSCAPAGQAPSYSPQTPFPSRPRTHLPRSGSGPGPPRAAEAGFGAP

SEQ ID NO: 5130 - protein, 34 aa, Homo sapiens
VRATARAPRWGMRPRRAGQGAPAAHPRGGGPERP

SEQ ID NO: 5131 - protein, 55 aa, Homo sapiens
RPPQEDPFSPRNYSMLKPLKVVLETLKAPWTGFMISKSLLWSQGNLDLRNAEGGL

SEQ ID NO: 5132 - protein, 54 aa, Homo sapiens
VEGRGAQARTNPHVPGRDPDPAAYREAKPAGWAAEPESGTVWSPLELRSGCSAS

SEQ ID NO: 5133 - protein, 225 aa, Homo sapiens
MGAGLGFGSVAPHSPKRPDVCRWLSPFILSCCVYFCLWIPEDQLSWFAALVKCLPVLCLAGFLWVMSPSGGYTQLLQGALVCSAVGDACLIWPAAFVPGMAAFATAHLLYVWAFGFSPLQPGLLLLIILAPGPYLSLVLQHLEPDMVLPVAAYGLILMAMLWRGLAQGGSAGWGALLFTLSDGVLAWDTFAQPLPHAHLVIMTTYYAAQLLITLSALRSPVPKTD

SEQ ID NO: 5134 - protein, 80 aa, Homo sapiens [sequence omitted]

SEQ ID NO: 5135 - protein, 114 aa, Homo sapiens
MRLKSSFLRGLGSWKSNPLRLGGWTILLTLTMGQGEPGGPQGDPWVPHELLLPSLCDSSHASSWGSGSITCAWRGGDSSSHPLVSGHILSNSPVAAVMCSSMGTHLSPFKGTLL

SEQ ID NO: 5136 - protein, 222 aa, Homo sapiens
MEHKEVVLLLLLFLKSAPTETGPSVQECYHSNGQSYRGTYFTTVTGRTCQAWSSMTPHQHSRTPEKYPNDGLISNYCRNPDCSAGPWCYTTDPNVRWEYCNLTRCSDDEGTVFVPLTVIPVPSLEDSFIQAPTEPRPSVQECYHGNGQSYRGTYFTTVTGRTCQAWSSMTPHQHSRTPEQYPNWLDLQLLQESGLFGRPLVLYNGSQSQVGVLQPDRMLRQE

SEQ ID NO: 5137 - protein, 133 aa, Homo sapiens
MFQVELVEAPTETGPSVQECYHSNGQSYRGTYFTTVTGRTCQAWSSMTPHQHSRTPEKYPNDGLISNYCRNPDCSAGPWCYTTDPNVRWEYCNLTRCSDDEGTVFVPLTVIPVPSLEDSFIQGKKSVARHLHA

SEQ ID NO: 5138 - protein, 92 aa, Homo sapiens
MLVLVLFGYGVLSPRSLMPGSLERGFCMAVREPDHLQRVSLPRMVYPQPKVLTPCRKDVLVVPLGWLPLSGRAHSTSTSSTSSSGSRTPPLG

SEQ ID NO: 5139 - skipped

SEQ ID NO: 5140 - protein, 93 aa, Homo sapiens
MGSVEGLAEQEDSSFQRDFLWEACSSGHCEPSLLSEGNCPSWLPLLPPLNAQAARPKSPTRDADGFGVKGWLLLPPALESQVQRRAKTPELEA

SEQ ID NO: 5141 - protein, 23 aa, Homo sapiens
LSSAMGALEARPGRSRPWGAHRP

SEQ ID NO: 5142 - protein, 47 aa, Homo sapiens
VLVCLVRELRGPGIVFKVVLLPTCPVVPAPVLTATLPFFHPRVGSTK

SEQ ID NO: 5143 - protein, 533 aa, Homo sapiens
MAQWLAYSRLYQSLEFPSSCLLHPITSIEYQWIQGRLKAEQQEELAASFSSLLTYGLSLIRRFRSVFPLSVSDSPARLQSLLRVLVQMCKMKAFGELCPNTAPLPQLVTEALQTGTTEWFHLKQQHHQPMVQGIPEAGKALLGLVQDVIGDLHQCQRTWDKIFHNTLKIHLFSMAFRELQWLVAKRVQDHTTVVGDVVSPEMGESLFQLYISLKELCQLRMSSSERDGVLALDNFHRWFQPAIPSWLQKTYNEALARVQRAVQMDELVPLGELTKHSTSAVDLSTCFAQISHTARQLDWPDPEEAFMITVKFVEDTCRLALVYCSLIKARARELSSGQKDQGQAANMLCVVVNDMEQLRLVIGKLPAQLAWEALEQRVGAVLEQGQLQNTLHAQLQSALAGLGHEIRTGVRTLAEQLEVGIAKHIQKLVGVRESVLPEDAILPLMKFLEVELCYMNTNLVQENFSRSVAAPALGALATSPSPPTAPPSWAPASVLRGVAAPALGALATSPSPPTAPLSWASASVLRGGGESLW

SEQ ID NO: 5144 - protein, 349 aa, Homo sapiens
MPGTKRFQHVIETPEPGKWELSGYEAAVPITEKSNPLTQDLDKADAENIVRLLGQCDAEIFQEEGQALSTYQRLYSESILTTMVQVAGKVQEVLKEPDGGLVVLSGGGTSGRMAFLMSVSFNQLMKGLGQKPLYTYLIAGGDRSVVASREGTEDSALHGIEELKKVAAGKKRVIVIGISVGLSAPFVAGQMDCCMNNTAVFLPVLVGFNPVSMARNDPIEDWSSTFRQVAERMQKMQEKQKAFVLNPAIGPEGLSGSSRMKGGSATKILLETLLLAAHKTVDQGIAASQRCLLEILRTFERAHQVTYSQSPKIATLMKSVSTRCVDMCLEVRMWPGWRILRAGRLCETC

SEQ ID NO: 5145 - protein, 80 aa, Homo sapiens
MALETICRPSGRKSSKMQAFRIWDVNQKTFYLRNNQLVAGYLQGPNVNLEGEWLPGKPMYVGITSLCPSVCSSMACLHKP

SEQ ID NO: 5146 - protein, 98 aa, Homo sapiens
MEICRGLRSHLITLLLFLFHSETICRPSGRKSSKMQAFRIWDVNQKTFYLRNNQLVAGYLQGPNVNLEGEWLPGKPMYVGITSLCPSVCSSMACLHKP

SEQ ID NO: 5147 - protein, 36 aa, Homo sapiens
TQTQKWKTVNDQPRRPCCELWPLPSRAPEPHAGGAG

SEQ ID NO: 5148 - protein, 263 aa, Homo sapiens
MASCDFSIRTYTYADTPDDFQLHNFSLPEEDTKLKIPLIHRALQLAQRPVSLLASPWTSPTRLKTRGAGNGKGPLKGQPRDIYHQTWARYIVKFLDAYAEHKLQFWAVTAENEPSAGLLSGYPFQCLGFTPEHQRDFIARDLGPTLANGTHHNVRLLMLDDQRLLLPHWAKVVLTDPEAAKYVHGIAVHWYLDFLAPAKATLRETHHLFPNTMLFASEACVGSKFWEQSVRLGSWDRGMQYSHSIITNLLYHVVGWTDWNPSL

SEQ ID NO: 5149 - protein, 145 aa, Homo sapiens
MTGLSMDGGGSPKGDVDPFYYGKPGPLRTLPEPSGPLPPSSGLSQPQVHALCPLSPLVTTGCCGQAAERDSCWERPPIPLLLPSLSGDYETVRNGGLIFAGLAFIVGLLILLSKWGGLQGRGADQGTSLLKAAEQAGFRELPREG

SEQ ID NO: 5150 - protein, 53 aa, Homo sapiens [sequence omitted]

SEQ ID NO: 5151 - protein, 98 aa, Homo sapiens
MSDHEATKCTSFRDNMKKVFPADGPLVTCVERASSLEYIKAITANEADAVTIDGGLVFEAGLAPYSLKPIVVEIYGSKDDPQTHHYVIAMVKRAPTSS

SEQ ID NO: 5152 - protein, 39 aa, Homo sapiens
MVKYEIVFYPQPAQLQAGGTLGMLSASIFLLKVLDKVSH

SEQ ID NO: 5153 - protein, 78 aa, Homo sapiens
KTWLLAATNQLCDSGKGGLSSYFCNMRTLDYLNSELRKLEGTLKPSKKEFGNVLHCCQFSSKNNLAWKLLVQWEFDSP

SEQ ID NO: 5154 - protein, 7 aa, Homo sapiens
VLLQLPQ

SEQ ID NO: 5155 - protein, 14 aa, Homo sapiens
LDSWIGSWTNGRMP

SEQ ID NO: 5156 - protein, 112 aa, Homo sapiens
LKSSFLRGLGSWKSNPLRLGGWTILLTLTMGQGEPGGPQGDPWVPHELLLPSLCDSSHASSWGSGSITCAWRGGDSSSHPLVSGHILSNSPVAAVMCSSMGTHLSPFKGTLL

SEQ ID NO: 5157 - protein, 43 aa, Homo sapiens [sequence omitted]

SEQ ID NO: 5158 - protein, 24 aa, Homo sapiens
LRLPRTGTFATHQILAPGSRERTG

SEQ ID NO: 5159 - protein, 458 aa, Homo sapiens
IQTSSEDIPGRVNLPALGVEVVKAMAMQKIFAREILDSRGNPTVEVDLHTAKGRFRAAVPSGASTGIYEALELRDGDKGRYLGKGVLKAVENINNTLGPALLQKKLSVVDQEKVDKFMIELDGTENKSKFGANAILGVSLAVCKAGAAEKGVPLYRHIADLAGNPDLILPVPAFNVINGGSHAGNKLAMQEFMILPVGASSFKEAMRIGAEVYHHLKGVIKAKYGKDATNVGDEGGFAPNILENNEALELLKTAIQAAGYPDKVVIGMDVAASEFYRNGKYDLDFKSPDDPARHITGEKLGELYKSFIKNYPVVSIEDPFDQDDWATWTSFLSGVNIQIVGDDLTVTNPKRIAQAVEKKACNCLLLKVNQIGSVTESIQACKLAQSNGWGVMVSHRSGETEDTFIADLVVGLCTGQIKTGAPCRSERLAKYNQLMRIEEALGDKAIFAGRKFRNPKAK

SEQ ID NO: 5160 - protein, 217 aa, Homo sapiens
TRRASSAAPIPLGLLGAALSSVTLYTRKLAGTMGKKQNKKKVEEVLEEEEEEYVVEKVLDRRVVKGKVEYLLKWKGFSDEDNTWEPEENLDCPDLIAEFLQSQKTAHETDKSEGGKRKADSDSEDKGEESKPKKKKEESEKPRGFARGLEPERIIGATDSSGELMFLMKWKNSDEADLVPAKEANVKCPQVVISFYEERLTWHSYPSEDDDKKDDKN

SEQ ID NO: 5161 - protein, 73 aa, Homo sapiens
LGGVRASFPRFFPPRLVPFPPAPSADLSRRPLPSHRPTQDPGLVTGQCDASRLPRGQRGTHRAWAAPEATRPG

SEQ ID NO: 5162 - protein, 684 aa, Homo sapiens
LCGCRHRRVEFPASGRTELFSRIQCSVSSPQSQSGADREQGTGMAKAAAIGIDLGTTYSCVGVFQHGKVEIIANDQGNRTTPSYVAFTDTERLIGDAAKNQVALNPQNTVFDAKRLIGRKFGDPVVQSDMKHWPFQVINDGDKPKVQVSYKGETKAFYPEEISSMVLTKMKEIAEAYLGYPVTNAVITVPAYFNDSQRQATKDAGVIAGLNVLRIINEPTAAAIAYGLDRTGKGERNVLIFDLGGGTFDVSILTIDDGIFEVKATAGDTHLGGEDFDNRLVNHFVEEFKRKHKKDISQNKRAVRRLRTACERAKRTLSSSTQASLEIDSLFEGIDFYTSITRARFEELCSDLFRSTLEPVEKALRDAKLDKAQIHDLVLVGGSTRIPKVQKLLQDFFNGRDLNKSINPDEAVAYGAAVQAAILMGDKSENVQDLLLLDVAPLSLGLETAGGVMTALIKRNSTIPTKQTQIFTTYSDNQPGVLIQVYEGERAMTKDNNLLGRFELSGIPPAPRGVPQIEVTFDIDANGILNVTATDKSTGKANKITITNDKGRLSKEEIERMVQEAEKYKAEDEVQRERVSAKNALESYAFNMKSAVEDEGLKGKISEADKKKVLDKCQEVISWLDANTLAEKDEFEHKRKELEQVCNPIISGLYQGAGGPGPGGFGAQGPKGGSGSGPTIEEVD

SEQ ID NO: 5163 - protein, 273 aa, Homo sapiens
VLTTTAFPFVSVMSWKKALRIPGDLRVATVTLMLAMLSSLLAEGRDSPEDFVFQFKGMCYFTNGTERVRLVTRYIYNREEYARFDSDVGVYRAVTPQGRPDAEYWNSQKEVLEGTRAELDTVCRHNYEVAFRGILQRRVEPTVTISPSRTEALNHHNLLVCSVTDFYPGQIKVRWFRNDQEETAGVVSTPLIRNGDWTFQILVMLEMTPQRGDVYTCHVEHPSLQSPITVEWRAQSESAQSKMLSGVGGFVLGLIFLGLGLIIRQRSQKGLLH

SEQ ID NO: 5164 - protein, 12 aa, Homo sapiens
LDSTARGEMLLC

SEQ ID NO: 5165 - protein, 21 aa, Homo sapiens
RFGRNCFLSGSPEYPEESVWN

SEQ ID NO: 5166 - protein, 95 aa, Homo sapiens
RLGGWTILLTLTMGQGEPGGPQGDPWVPHELLLPSLCDSSHASSWGSGSITCAWRGGDSSSHPLVSGHILSNSPVAAVMCSSMGTHLSPFKGTLL

SEQ ID NO: 5167 - protein, 37 aa, Homo sapiens
TQGASVRHMEVMVFLREKITEETSALMALQSWQYYNP

SEQ ID NO: 5168 - protein, 85 aa, Homo sapiens
RKNFLPRLCRMKSFPAWQLFFHKRGLSQDLVATGSATAENVLPCGFLSSCPWPEVPALMAAPHLQLLCSPLPKPYGLPCICIHPV

SEQ ID NO: 5169 - protein, 74 aa, Homo sapiens
LPLLILSRSAALQCDESESSSHPARAFLLLPALFYFSFGRRRHCCTQLVSVPRFYPQVVPAAYGPGRLGYFCSR

SEQ ID NO: 5170 - protein, 68 aa, Homo sapiens
LRAPARSQKGEGRRELACGTPDRRGCAFPAPGPSRHTRSSPLARANAQDDHHPRVCHHLRLERSFMQG

SEQ ID NO: 5171 - protein, 203 aa, Homo sapiens
MEPAAALHFSRPASLLLLLSLCALVSAQVTVVGPTDPILAMVGENTTLRCCLSPEENAEDMEVRWFQSQFSPAVFVYKGGRERTEEQKEEYRGRTTFVSKDSRGSVALIIHNVTAEDNGIYQCYFQEGRSCNEAILHLVVAGALLHFALLLWHCVTLGKASLLNSSPLQTSTILFPGSPFRRDTLPMKRRFQGKILPPAQGPP

SEQ ID NO: 5172 - protein, 30 aa, Homo sapiens
MRRSRRRRGGDRTEDGPCREEQAGENESRL

SEQ ID NO: 5173 - protein, 15 aa, Homo sapiens
KDLEPRAANCTRVLV

SEQ ID NO: 5174 - protein, 33 aa, Homo sapiens
VSVSELCSRRRGETREAIVATLRLLVSSQAVRP

SEQ ID NO: 5175 - protein, 226 aa, Homo sapiens
LGATPPGDPTRRASSAAPIPLGLLGAALSSVTLYTRKLAGTMGKKQNKKKVEEVLEEEEEEYVVEKVLDRRVVKGKVEYLLKWKGFSDEDNTWEPEENLDCPDLIAEFLQSQKTAHETDKSEGGKRKADSDSEDKGEESKPKKKKEESEKPRGFARGLEPERIIGATDSSGELMFLMKWKNSDEADLVPAKEANVKCPQVVISFYEERLTWHSYPSEDDDKKDDKN

SEQ ID NO: 5176 - protein, 35 aa, Homo sapiens
MPFFLSSYFRYPIECFLLPGRVRKLCVSGDHGYHS

SEQ ID NO: 5177 - protein, 7 aa, Homo sapiens
MTSTPDV

SEQ ID NO: 5178 - protein, 182 aa, Homo sapiens
MDDGKPTRAGWEGCCLAPLAPRWKRCNQNEEEKEKKCLKNHHGGSELQSEFRAAESWSAAGSARRSVRQRWERAPAPPGGRWTSESECVCARVSVGVSSRFLGMCVRGGMCWGYTRSRGNLSLTQAVGACESPPEIGREKSWRQSLEARGKEKGGGRKKRATHCTAEIHRPSQRQNLDWISS

SEQ ID NO: 5179 - protein, 141 aa, Homo sapiens [sequence omitted]

SEQ ID NO: 5180 - protein, 191 aa, Homo sapiens
MRYFYTTMSRPGRGEPRFISVGYVDDTQFVRFDSDDASPREEPRAPWMEREGPEYWDRNTQICKAQAQTERENLRIALRYYNQSEGGSHTMQVMYGCDVGPDGRFLRGYEQHAYDGKDYIALNEDLRSWTAADMAAQITKRKWEAARRAEQLRAYLEGEFVEWLRRYLENGKETLQRADPPQDTYDPPPHL

SEQ ID NO: 5181 - protein, 646 aa, Homo sapiens
MAPTWLSDIPLVQPPGHQDVSERRLDTQRPQVTMWERDVSSDRQEPGRRGRSWGLEGSQALSQQAEVIVRQLQELRRLEEEVRLLRETSLQQKMRLEAQAMELEALARAEKAGRAEAEGLRAALAGAEVVRKNLEEGSQRELEEVQRLHQEQLSSLTQAHEEALSSLTSKAEGLEKSLSSLETRRAGEAKELAEAQREAELLRKQLSKTQEDLEAQVTLVENLRKYVGEQVPSEVHSQTWELERQKLLETMQHLQEDRDSLHATAELLQVRVQSLTHILALQEEELTRKVQPSDSLEPEFTRKCQSLLNRWREKVFALMVQLKAQELEHSDSVKQLKGQVASLQEKVTSQSQEQAILQRSLQDKAAEVEVERMGAKGLQLELSRAQEARRRWQQQTASAEEQLRLVVNAVSSSQIWLETTMAKVEGAAAQLPSLNNRLSYAVRKVHTIRGLIARKLALAQLRQESCPLPPPVTDVSLELQQLREERNRLDAELQLSARLIQQEVGRAREQGEAERQQLSKVAQQLEQELQQTQESLASLGLQLEVARQGQQESTEEAASLRQELTQQQELYGQGVEREMGASLGGWGGNCESKLLLICPVCTFTPALQEKVAEVETRLREQLSDTERRLNEARREHAKAGEPCQGG

SEQ ID NO: 5182 - protein, 138 aa, Homo sapiens
KGMHIRKAMKYLKDVTLQKQCVPFRRYNGGAGRCAQAKQWGWTQGQWPKKSAEFLLHMLKNAESNAELKGLNVDSLVIEHIQVNKAPKMCRWTYRAHGWINPSMSSPCHIEMILTEKEQIVPKPEEEVAQKKMISQRN

SEQ ID NO: 5183 - protein, 66 aa, Homo sapiens
KVPEEKVSSFVYPVGRLGKHTSFAQGLGPNFKRRTPRSCTRYPIECFLLPGRVRKLCVSGDHGYHS

SEQ ID NO: 5184 - protein, 346 aa, Homo sapiens
LDGAEYRTIQANCTGTGIGYNIIWVPMASCDFSIRTYTYADTPDDFQLHNFSLPEEDTKLKIPLIHRALQLAQRPVSLLASPWTSPTRLKTRGAGNGKGPLKGQPRDIYHQTWARYIVKFLDAYAEHKLQFWAVTAENEPSAGLLSGYPFQCLGFTPEHQRDFIARDLGPTLANGTHHNVRLLMLDDQRLLLPHWAKVVLTDPEAAKGLCGFQVLGAECAARLLGSRDAVQPQHHHKPPVPCGRLDRLEPIIVDITKHTFYKQPMFYHLGHFSKFIPEGSQRVGLVASQKNDPDAVALMHPDGSAVVVVLNRSSKDVPLTIKDPAVGFLETISPGYSIHTYLWRRQ

SEQ ID NO: 5185 - protein, 562 aa, Homo sapiens
LRVGARDVIVGAQPAAPCPSPPGPEYRPPTKEEPEVSVPAAMLPRRPLAWPAWLLRGAPGAAGSWGRPVGPLARRGCCSAPGTPEVPLTRERYPVRRLPFSTVSKQDLAAFERIVPGGVVTDPEALQAPNVDWLRTLRGCSKVLLRPRTSEEVSHILRHCHERNLAVNPQGGNTGMVGGSVPVFDEIILSTARMNRVLSFHSVSGILVCQAGCVLEELSRYVEERDFIMPLDLGAKGSCHIGGNVATNAGGLRFLRYGSLHGTVLGLEVVLADGTVLDCLTSLRKDNTGYDLKQLFIGSEGTLGIITTVSILCPPKPRAVNVAFLGCPGFAEVLQTFSTCKGMLGEILSAFEFMDAVCMQLVGRHLHLASPVQESPFYVLIETSGSNAGHDAEKLGHFLEHALGSGLVTDGTMATDQRKVKMLWALRERITEALSRDGYVYKYDLSLPVERLYDIVTDLRARLGPHAKHVVGYGHLGDGNLHLNVTAEAFSPSLLAALEPHVYEWTAGQQGSVSAEHGVGFRKRDVLGYSKPPGALQLMQQLKALLDPKGILNPYKTLPSQA

SEQ ID NO: 5186 - protein, 237 aa, Homo sapiens
RAHWSSRERGLSRGRGAGGMALVPYEETTEFGLQKFHKPLATFSFANHTIQIRQDWRHLGVAAVVWDAAIVLSTYLEMGAVELRGRSAVELGAGTGLVGIVAALLGAHVTITDRKVALEFLKSNVQANLPPHIQTKTVVKELTWGQNLGSFSPGEFDLILGADIIYLEETFTDLLQTLEHLCSNHSVILLACRIRYERDNNFLAMLERQFTVRKVHYDPEKDVHIYEAQKRNQKEDL

SEQ ID NO: 5187 - protein, 87 aa, Homo sapiens
LAEGNRRAARRRRRQVARSRAGAGPGHGRLGAAVRVVAALLRAEGPGLPAAVAEGLCRCLQEEHLTVLSGATKARGGRCRGPAATTG

SEQ ID NO: 5188 - protein, 40 aa, Homo sapiens
LLSGLGSSGRGVREDQRTTSPRKLPTTSKLRGEFVTERPR

SEQ ID NO: 5189 - protein, 113 aa, Homo sapiens
LKTLQSALIPSALSPHPEKYMEFDLNGNGDIDIMSLKRMLEKLGVPKTHLELKKLIGEVSSGSGETFSYPDFLRMMLGKRSAILKMILMYEEKAREKEKPTGPPAKKAISELP

SEQ ID NO: 5190 - protein, 64 aa, Homo sapiens
MVLPHEFSWSRGIPPNPGSPQELQKGSAGGRGPCCTCSLGTGEALIADRGCCHLCLLPAESHKP

SEQ ID NO: 5191 - protein, 14 aa, Homo sapiens
KKRRKTLEPRQRGA

SEQ ID NO: 5192 - protein, 5 aa, Homo sapiens
LAVAV

SEQ ID NO: 5193 - protein, 52 aa, Homo sapiens
LDLFIIGLQPITVSFCPQKRRQQPLPNVESKKCEPRNSETDLNYLPRLRTRA

SEQ ID NO: 5194 - protein, 72 aa, Homo sapiens
KEINIFKLDVSTVLLFCLESGTRGASACAAGAAGNSGCFSLSLSFLGAHFCCFDSRAYQVRSEGGRRQCPFC

SEQ ID NO: 5195 - protein, 56 aa, Homo sapiens
LWPLQVWQRWGMGIGVSISLCGVSQGGQWGWGWDAVCAQRGQPGLIWPRGFWMFLG

SEQ ID NO: 5196 - protein, 40 aa, Homo sapiens
VFTGTVVRAGFAAVRALNPPVELLSRETAGEWLGTNHGNP

SEQ ID NO: 5197 - protein, 61 aa, Homo sapiens
KHKKGQSEEIQKKRTRRAVKFQRAITGASLADIMAKRDQKPEVRKAQREQAIRAAKEAKKG

SEQ ID NO: 5198 - protein, 53 aa, Homo sapiens
LAWREHLRDGISARKIAERAQGELFPDRALSSWGNAAAAAGDPIDSWLSAGPS

SEQ ID NO: 5199 - protein, 318 aa, Homo sapiens
MIFDPTVSKKKKKKKKPFMLDEEADTQTEITQPSETKEVGPEPTEDKDLEADEEDTRKKDAAGDLDDLNFFNQKKKKKKTKKIFDIDEAEEGVKDLKIESDVQEPTEPENDLDIMLGNKKKKKKVKFPDEDEILEKDEVLEEEDSKKDDGISFSNQTGPAWAGSERDYTYEELLNRVFNIMREKNPGMVAGDIRKFVMKPPQVVRVGTKKTSFVNFTHICKLLHHQPKHLRAFLLAELGTSGSIDGNNQLVIKGRFQQKQIENVLRRYIKEYVTCHTCRLLDTILQKDMRIYFLQCETCHSRCSVASIKTSYQAVMGK

SEQ ID NO: 5200 - protein, 221 aa, Homo sapiens
VDDPHSFHQSKLTNEDFRKLLMTPRAAPTSAPPSKSRHHEMPREYNEDEDPAARRRKKKSYYAKLRQQEIERERELAEKYRGRAKERRDGVNKDYEETELINTTANYRAVGPTTKADKSAAEKRRQLIQESKFLGGDMEHTHLVKGLDFALLQKVRAEIASKEKEEEELMEKPQKETKKDEDPENKIEFKTRLGRNVYRVLFKNKHISGMSCSCRAAWPMW

SEQ ID NO: 5201 - protein, 31 aa, Homo sapiens
LNRRSQRALCFFLWEYLNLVSMLITDQKYRF

SEQ ID NO: 5202 - protein, 11 aa, Homo sapiens
RKTLEPRQRGA

SEQ ID NO: 5203 - skipped

SEQ ID NO: 5204 - protein, 67 aa, Homo sapiens
VVYSSVELRAPWTSQVFRVFHLELYKVQKTCLEDMTPGPLYFLQKVAYTKLNMPWKLLDMQAPVWEF

SEQ ID NO: 5205 - protein, 50 aa, Homo sapiens
KKRTRRAVKFQRAITGASLADIMAKRDQKPEVRKAQREQAIRAAKEAKKG

SEQ ID NO: 5206 - protein, 307 aa, Homo sapiens
MLRQGDTGDWIGTFWGHKGAVWGATLNATKAATAAADFTAKVWDAVLGDELMTLAHKYIVKTVYFMQDSNYLLTKGQDKLLRMYDLNKPKARPKEISGHTSGIKKRLLWCSEDKQILSADDKTARLWDHATMTEVKSLNFNMSVSSTKYIPEGEILVITYGLSIAFHSAVSLDPITSFEAPATINSASLHPEKEFLVAGGEDFKLYKYFNHGEEFESYKGYFGPIHCVRFSRDGELYASGSEDGTLRLGQTVVGKTYGLWKCVLPEEESGELAKPKIGFPETTEEELEEIVSEDSDCIYSSTPDVKA

SEQ ID NO: 5207 - protein, 85 aa, Homo sapiens [sequence omitted]

SEQ ID NO: 5208 - protein, 250 aa, Homo sapiens
ISLGCPCFVLWTTAQQCPALCLGLGPSCTCCLDPRPAWAWALVLPMTPPERLFLPRVCGTTLHLLLLGLLLVLLPGAQGLPGVGLTPSAAQTARQHPKMHLAHSTLKPAAHLIGDPSKQNSLLWRANTDRAFLQDGFSLSNNSLLVPTSGIYFVYSQVVFSGKAYSPKATSSPLYLAHEVQLFSSQYPFHVPLLSSQKMVYPGLQEPWLHSMYHGAAFQLTQGDQLSTHTDGIPHLVLSPSTVFFGAFAL

SEQ ID NO: 5209 - protein, 82 aa, Homo sapiens
TGGEGRGQRARIRAFRGSRALRAPPYPRGWRAAPEAPARLAVPRLPARASYSTRALNLSVTQALSPESLASWFKRNGRKGAM

SEQ ID NO: 5210 - protein, 51 aa, Homo sapiens
RGPRERVVINRASAGNVTGGYIHQLTEQEVLQCFFIQCLEFTGPSQAAVRI

SEQ ID NO: 5211 - protein, 53 aa, Homo sapiens
LGRAVSGPRALGGSAARSVGACSRAVWRAWRTGQPPNLQAHRLDAVDKRGESD

SEQ ID NO: 5212 - protein, 136 aa, Homo sapiens
LSRGRGAGGMALVPYEETTEFGLQKFHKPLATFSFANHTIQIRQDWRHLGVAAVVWDAAIVLSTYLEMGAVELRGRSAVELGAGTGLVGIVAALLENTGQMQTEGYSKRKQITTLQKLQGHQRQGNKLSQTEGDYN

SEQ ID NO: 5213 - protein, 24 aa, Homo sapiens
RTTSPRKLPTTSKLRGEFVTERPR

SEQ ID NO: 5214 - protein, 68 aa, Homo sapiens
IFKLDVSTVLLFCLESGTRGASACAAGAAGNSGCFSLSLSFLGAHFCCFDSRAYQVRSEGGRRQCPFC

SEQ ID NO: 5215 - protein, 83 aa, Homo sapiens
LKNYTEGDNNVITKSTTHTACVLVYWFLCDNHRDTDHPFRHGPTAAGGFPYRDEGRLRHRLPFPSVLWSLGGHEQPREWGLAV

SEQ ID NO: 5216 - protein, 42 aa, Homo sapiens
MVGPLFTSAVSSFSCKKSLECTKLCLPQIENVKGTEDSGEEK

SEQ ID NO: 5217 - protein, 332 aa, Homo sapiens
MVDLAFSGITTYGYFLTSAYKDGKPMLRQGDTGDWIGTFWGHKGAVWGATLNATKAATAAADFTAKVWDAVLGDELMTLAHKYIVKTVYFMQDSNYLLTKGQDKLLRMYDLNKPKARPKEISGHTSGIKKRLLWCSEDKQILSADDKTARLWDHATMTEVKSLNFNMSVSSTKYIPEGEILVITYGLSIAFHSAVSLDPITSFEAPATINSASLHPEKEFLVAGGEDFKLYKYFNHGEEFESYKGYFGPIHCVRFSRDGELYASGSEDGTLRLGQTVVGKTYGLWKCVLPEEESGELAKPKIGFPETTEEELEEIVSEDSDCIYSSTPDVKA

SEQ ID NO: 5218 - protein, 114 aa, Homo sapiens
MWPGLTCYPPHWVRTQRLLSGPWVPGSGVSGQALAVAPDGKLLFSGGHWDGSLRVTALPRGKLLSQLSCHLDVVTCLALDTCGIYLISGSRDTTCMVWRLLHQVCLVGSSVGPP

SEQ ID NO: 5219 - protein, 277 aa, Homo sapiens [sequence omitted]

SEQ ID NO: 5220 - protein, 138 aa, Homo sapiens
MGVRLSRAHCHETACVSALSPAPGATSPRPSSLDWGRTGLLYPGGGRKSRKRRSVREGSLRAEAARPPPVQAARWGASQGFRSRQQEQDVNCFSSAEKEALPPPPATANVLKKTLHGNGLPYDDRNGGNIHLFYISEW

SEQ ID NO: 5221 - protein, 281 aa, Homo sapiens
VLTTTAFPFVSVMSWKKALRIPGDLRVATVTLMLAMLSSLLAEGRDSPEDFVFQFKGMCYFTNGTERVRLVTRYIYNREEYARFDSDVGVYRAVTPQGRPDAEYWNSQKEVLEGTRAELDTVCRHNYEVAFRGILQRRVEPTVTISPSRTEALNHHNLLVCSVTDFYPGQIKVRWFRNDQEETAGVVSTPLIRNGDWTFQILVMLEMTPQRGDVYTCHVEHPSLQSPITVEWRAQSESAQSKMLSGVGGFVLGLIFLGLGLIIRQRSQKGPQGPPPAGLLH

SEQ ID NO: 5222 - protein, 4 aa, Homo sapiens
LRTS

SEQ ID NO: 5223 - protein, 431 aa, Homo sapiens
IDLPSWTQFRQDTGTMRTVRRHLFPQHSAPGRGVVWEWLSDDGSWTAYEAGVCDDLEQQVARGNQLVDLAPLGYNYTVNYTTHTQTNKTSSFCCSVRRQAGPPYPVTTIIAPPGHTGVACSCHQCLSGSRTGPVSGRYRHSMTNLPAYPAPQHPPHRTASVFGTHQAFAPYNKPSLSGARSAPRLNTTNAWDAAPPSLGSQPLYRSSLSHLGPQHLPPGSSTSGAVSASLPSGPSSSPGSVPATVPMQMPKPSRVQQALAGMTSVLMSAIGLPVCLSRAPQPTSPPASRLASKSHGSVKRLRKMSVKGATPKPEPEPEQVIKNYTEELKVPPDEDCIICMEKLSAASGYSDVTDSKAIGPLAVGCLTKCSHAFHLLCLLAMYCNGNKDGSLQCPSCKTIYERRRGPSPRERWRYYGSRCRSPATRTAGPSS

SEQ ID NO: 5224 - protein, 30 aa, Homo sapiens
LPSWAPLPQATRRDAPAAQHRFLSGSWALL

SEQ ID NO: 5225 - protein, 39 aa, Homo sapiens
TRPGPALPSLLPPGAPGRGGGGGRGPAGLASALRHLELR

SEQ ID NO: 5226 - protein, 645 aa, Homo sapiens
LALRERRPGRSVSASVALGPTLAFKEDTRTPGSWEMDSVAFEDVAVNFTQEEWALLGPSQKSLYRNVMQETIRNLDCIEMKWEDQNIGDQCQNAKRNLRSHTCEIKDDSQCGETFGQIPDSIVNKNTPRVNPCDSGECGEVVLGHSSLNCNIRVDTGHKSCEHQEYGEKPYTHKQRGKAISHQHSFQTHERPPTGKKPFDCKECAKTFSSLGNLRRHMAAHHGDGPYKCKLCGKAFVWPSLFHLHERTHTGEKPYECKQCSKAFPFYSSYLRHERIHTGEKAYECKQCSKAFPDYSTYLRHERTHTGEKPYKCTQCGKAFSCYYYTRLHERTHTGEQPYACKQCGKTFYHHTSFRRHMIRHTGDGPHKCKICGKGFDCPSSVRNHETTHTGEKPYECKQCGKVLSHSSSFRSHMITHTGDGPQKCKICGKAFGCPSLFQRHERTHTGEKPYQCKQCGKAFSLAGSLRRHEATHTGVKPYKCQCGKAFSDLSSFQNHETTHTGEKPYECKECGKAFSCFKYLSQHKRTHTVEKPYECKTCRKAFSHFSNLKVHERIHSGEKPYECKECGKAFSWLTCLLRHERIHTGEKPYECLQCGKAFTRSRFLRGHEKTHTGEKLYECKECGKALSSLRSLHRHKRTHWKDTL

SEQ ID NO: 5227 - protein, 84 aa, Homo sapiens [sequence omitted]

SEQ ID NO: 5228 - protein, 78 aa, Homo sapiens [sequence omitted]

SEQ ID NO: 5229 - protein, 346 aa, Homo sapiens
MRQTLLTYFGHTWPMVDLAFSGITTYGYFLTSAYKDGKPMLRQGDTGDWIGTFWGHKGAVWGATLNATKAATAAADFTAKVWDAVLGDELMTLAHKYIVKTVYFMQDSNYLLTKGQDKLLRMYDLNKPKARPKEISGHTSGIKKRLLWCSEDKQILSADDKTARLWDHATMTEVKSLNFNMSVSSTKYIPEGEILVITYGLSIAFHSAVSLDPITSFEAPATINSASLHPEKEFLVAGGEDFKLYKYFNHGEEFESYKGYFGPIHCVRFSRDGELYASGSEDGTLRLGQTVVGKTYGLWKCVLPEEESGELAKPKIGFPETTEEELEEIVSEDSDCIYSSTPDVKA

SEQ ID NO: 5230 - protein, 62 aa, Homo sapiens
TKHKKGQSEEIQKKRTRRAVKFQRAITGASLADIMAKRDQKPEVRKAQREQAIRAAKEAKKG

SEQ ID NO: 5231 - protein, 19 aa, Homo sapiens
MTELGCDSIEKLKAQIPKM

SEQ ID NO: 5232 - protein, 140 aa, Homo sapiens
LGTITPLREAENSFPKSFGDFSLFTHLRPCEELRGQFGRRARLPVRRVLGPGNREGPAIARRPPRGCERAWAPAEPRPWCSKPTMPRTRKRCWPARARTRAPASSWESPPPPRPAPPPPRAARPTTRAGARPRVGTSSDP

SEQ ID NO: 5233 - protein, 50 aa, Homo sapiens
IKKKNNSNCKLATIPYVPHSWHHEGGRRSQADSHHHQDGKSRSGAFPLPG

SEQ ID NO: 5234 - protein, 218 aa, Homo sapiens
MNVVGPLVRVHILLNIKECIQEKNSMNVMNVRKPSMITQLLFNIILSILQRNPMNIMTGKTFSYCSDLIQHQRMHTGEKPYKCNECGNAFSDCSSLIQHQRTHTGEEPYECKQCGKAFSRSTYLTQHQRSHAGEKQYKCNECEKTFSLSSFLTQHMRVQTGEKPYKYNEYGKAFSDCSGHFQRTHTGEKPCECNDCGKPFSFCSALIQHKRIHTRKKP

SEQ ID NO: 5235 - protein, 10 aa, Homo sapiens
TRSLINSWGV

SEQ ID NO: 5236 - protein, 58 aa, Homo sapiens
LTGKMSVWSEAGAIAATVTPGARRRQQQQQQQRGEETAASRSSRRSRGSNADSTLRTR

SEQ ID NO: 5237 - protein, 123 aa, Homo sapiens
MCPACHTASRKQSVMQVFWPEPHKDHEGAGGARPVAAVPGVGAACPAAGAGCTRSGRNTHLPLAGRRDRGAAGVRPVPPRHLCAAAVPPRQPHDVWPVSTAPLHAVLELPRALPLLQRPLRGA

SEQ ID NO: 5238 - protein, 34 aa, Homo sapiens
MRLDIWNHNHNRPERPTSLMTSFFFQRKVSVWGT

SEQ ID NO: 5239 - protein, 167 aa, Homo sapiens
TVSRLSRETANCSAVRERERGRERLSSLGTITPLREAENSFPKSFGDFSLFTHLRPCEELRGQFGRRARLPVRRVLGPGNREGPAIARRPPRGCERAWAPAEPRPWCSKPTMPRTRKRCWPARARTRAPASSWESPPPPRPAPPPPRAARPTTRAGARPRVGTSSDP

SEQ ID NO: 5240 - protein, 45 aa, Homo sapiens
IGSGLAGSGGAGGPSSTVTWCALFSNHVAATQVRRGRSSWGCFSV

SEQ ID NO: 5241 - protein, 36 aa, Homo sapiens
RRSTEGAAKRAVSANPASLCGGLCHRAMGPEVPGPG

SEQ ID NO: 5242 - protein, 30 aa, Homo sapiens
IWNHNHNRPERPTSLMTSFFFQRKVSVWGT

SEQ ID NO: 5243 - protein, 566 aa, Homo sapiens
LPGVRANYQRSGAGASVRVCACVCASAVEGGDQLLHTFNTALKRESERETGDAQIPPRSPKPTVPQIIVQSPKNRNRGNEQQLNMDEGIPHLQERQLLEHRDFIGLDYSSLYMCKPKRSMKRDDTKDTYKLPHRLIEKKRRDRINECIAQLKDLLPEHLKLTTLGHLEKAVVLELTLKHLKALTALTEQQHQKIIALQNGERSLKSPIQSDLDAFHSGFQTCAKEVLQYLSRFESWTPREPRCVQLINHLHAVATQFLPTPQLLTQQVPLSKGTGAPSAAGSAAAPCLERAGQKLEPLAYCVPVIQRTQPSAELAAENDTDTDSGYGGEAEARPDREKGKGAGASRVTIKQEPPGEDSPAPKRMKLDSRGGGSGGGPGGGAAAAAAALLGPDPAAAAALLRPDAALLSSLVAFGGGGGAPFPQPAAAAAPFCLPFCFLSPSAAAAYVQPFLDKSGLEKYLYPAAAAAPFPLLYPGIPAPAAAAAAAAAAAAAAAAFPCLSSVLSPPPEKAGAAAATLLPHEVAPLGAPHPQHPHGRTHLPFAGPREPGNPESSAQEDPSQPGKEAP

SEQ ID NO: 5244 - protein, 40 aa, Homo sapiens
IPPIPANMTAAVSLTRSPAISASCAASRSASPWAWPWTWF

SEQ ID NO: 5245 - protein, 9 aa, Homo sapiens
RSLINSWGV

SEQ ID NO: 5246 - protein, 77 aa, Homo sapiens
KKNNSNCKLATIPYVPHSWHHEGGRRSQADSHHHQDGKSRSGAFPLPGYGMCRCPTINSKQQRNDVSSIKSYFQWFH

SEQ ID NO: 5247 - protein, 242 aa, Homo sapiens
IHQVRAVLTTTAFPFVSVMSWKKALRIPGDLRVATVTLMLAMLSSLLAEGRDSPEDFVFQFKGMCYFTNGTERVRLVTRYIYNREEYARFDSDVGVYRAVTPQGRPDAEYWNSQKEVLEGTRAELDTVCRHNYEVAFRGILQRRVEPTVTISPSRTEALNHHNLLVCSVTDFYPGQIKVRWFRNDQEETAGVVSTPLIRNGDWTFQILVMLEMTPQRGDVYTCHVEHPSLQSPITVEWRLLH

SEQ ID NO: 5248 - protein, 63 aa, Homo sapiens
KKRGWYPGSSRCNFREVLVCLVRELRGPGIVFKVVLLPTCPVVPAPVLTATLPFFHPRVGSTK

SEQ ID NO: 5249 - protein, 41 aa, Homo sapiens
VARSWVCHKTYVTPRRPFEKSRLDQELKLIGEYGFRNKREV

SEQ ID NO: 5250 - protein, 56 aa, Homo sapiens
LVATGSATAENVLPCGFLSSCPWPEVPALMAAPHLQLLCSPLPKPYGLPCICIHPV

SEQ ID NO: 5251 - protein, 33 aa, Homo sapiens [sequence omitted]

SEQ ID NO: 5252 - protein, 338 aa, Homo sapiens
MGDGEGHFEGAVGSTMAPEERSGGSGWWEEARRNWFSVCPLSRRRRSLGRKGRMGGQVGCQGLPLTPSFPLFTLSSLPQDLEELALYQIQLLKDLRHTENEEDKVSSSSFRQRMLGNLLRPPYERPELPTCLYVIGLTGISGSGKSSIAQRLKGLGAFVIDSDHLGHRAYAPGGPAYQPVVEAFGTDILHKDGIINRKVLGSRVFGNKKQLKILTDIMWPIIAKLAREEMDRAVAEGKRVCVIDAAVLLEAGWQNLVHEVWTAVIPETEAVRRIVERDGLSEAAAQSRLQSQMSGQQLVEQSHVVLSTLWEPHITQRQVEKAWALLQKRIPKTHQALD

SEQ ID NO: 5253 - protein, 32 aa, Homo sapiens
LVSGHILSNSPVAAVMCSSMGTHLSPFKGTLL

SEQ ID NO: 5254 - protein, 25 aa, Homo sapiens
ILPRRRGWPSWRPEPSSCYSRGPWP

SEQ ID NO: 5255 - protein, 279 aa, Homo sapiens
IHQVRAVLTTTAFPFVSVMSWKKALRIPGDLRVATVTLMLAMLSSLLAEGRDSPEDFVFQFKGMCYFTNGTERVRLVTRYIYNREEYARFDSDVGVYRAVTPQGRPDAEYWNSQKEVLEGTRAELDTVCRHNYEVAFRGILQRRVEPTVTISPSRTEALNHHNLLVCSVTDFYPGQIKVRWFRNDQEETAGVVSTPLIRNGDWTFQILVMLEMTPQRGDVYTCHVEHPSLQSPITVEWRAQSESAQSKMLSGVGGFVLGLIFLGLGLIIRQRSQKGLLH

SEQ ID NO: 5256 - protein, 36 aa, Homo sapiens
LLFRFRAYSLLAVSCHHVGNRSCRDSHPSAGGEIPG

SEQ ID NO: 5257 - protein, 144 aa, Homo sapiens
LLCYNRSCGQRFDPETNSDDACTYHPGVPVFHDALKGWSCCKRRTTDFSDFLSIVGCTKGRHNSEKPPEPVKPEVKTTEEKELSELKPKFQEHIQAPKTVDAIKRPSPDEPMTNLELKISASLKQALDKLKLSSGNEENKKRRQ

SEQ ID NO: 5258 - protein, 596 aa, Homo sapiens
MPLLAPAAATVFLEIWKRQRARVVLHWDLYVWDEEQEEMALQLINCPDYKLRPYQHSYLRSTVILVLTLLMICLMIGMAHVLVVYRVLASALFSSSAVPFLEEQVTTAVVVTGALVHYVTIIIMTKINRCVALKLCDFEMPRTFSERESRFTIRFFTLQFFTHFSSLIYIAFILGRINGHPGKSTRLAGLWKLEECHASGCMMDLFVQMAIIMGLKQTLSNCVEYLVPWVTHKCRSLRASESGHLPRDPELRDWRRNYLLNPVNTFSLFDEFMEMMIQYGFTTIFVAAFPLAPLLALFSNLVEIRLDAIKMVWLQRRLVPRKAKDIGQTGRAQDGRELGGLRPVGFPLARPAHLEKIISRISGRRQPPALLRRPRMRVEPGWEGTRSGRGRALCRLLPQTVRISEGLDAPKGDPGSASGWGWNRAAGLCPKTGHAETDRQQGSDGSWGAGCGERERGVREAPSLGPRLQGLTLGWEPRRWSGWGAQLRSSGRWRMRIPRFLPVHVRVRGAGAQRPCSAMAGDFLVNTAALGLQGDTTHRDTAGPVLAGGGGEGRTSRGTLSQTACPLLWCRDLAAGAGDHRCAGGHCQWDGHCLHI

SEQ ID NO: 5259 - protein, 248 aa, Homo sapiens
LGCPCFVLWTTAQQCPALCLGLGPSCTCCLDPRPAWAWALVLPMTPPERLFLPRVCGTTLHLLLLGLLLVLLPGAQGLPGVGLTPSAAQTARQHPKMHLAHSTLKPAAHLIGDPSKQNSLLWRANTDRAFLQDGFSLSNNSLLVPTSGIYFVYSQVVFSGKAYSPKATSSPLYLAHEVQLFSSQYPFHVPLLSSQKMVYPGLQEPWLHSMYHGAAFQLTQGDQLSTHTDGIPHLVLSPSTVFFGAFAL

SEQ ID NO: 5260 - protein, 83 aa, Homo sapiens
MGQGEPGGPQGDPWVPHELLLPSLCDSSHASSWGSGSITCAWRGGDSSSHPLVSGHILSNSPVAAVMCSSMGTHLSPFKGTLL

SEQ ID NO: 5261 - protein, 165 aa, Homo sapiens [sequence omitted]

SEQ ID NO: 5262 - protein, 140 aa, Homo sapiens
MDGGGSPKGDVDPFYYGKPGPLRTLPEPSGPLPPSSGLSQPQVHALCPLSPLVTTGCCGQAAERDSCWERPPIPLLLPSLSGDYETVRNGGLIFAGLAFIVGLLILLSKWGGLQGRGADQGTSLLKAAEQAGFRELPREG

SEQ ID NO: 5263 - protein, 13 aa, Homo sapiens
MLRVHYPRLFIQE

SEQ ID NO: 5264 - protein, 33 aa, Homo sapiens
LGWMRRSRRRRGGDRTEDGPCREEQAGENESRL

SEQ ID NO: 5265 - protein, 48 aa, Homo sapiens
KPSGSHEGGNTCGALVGGGAALQRSKKKFQKNEQQPPRPGIGAGDKGS

SEQ ID NO: 5266 - protein, 42 aa, Homo sapiens
ITTFESFPFSSLNPLSTFNAFNTFCSFNACRTCRSHVTSTVH

SEQ ID NO: 5267 - protein, 75 aa, Homo sapiens
IQFRRVTGAAVASQGAGSLSPALLPLAPSPRPRRAGLRGQGPSGEGYHLTWKKMSSLEKKHSNVIVQNSLNIHNR

SEQ ID NO: 5268 - protein, 193 aa, Homo sapiens
VKEFEDKKVELKENLIAELAEEKKMIENEMLTMELNGDSMQVRPIMTRKLRRRPNDPVPIPDKRRKPAPAQLNYLLTDEQIMEDLRTLNKLKSPKRPASPSSPEHLPATPAESPAQRFEARIEDGKLHYDKRWYHKSQAIYLESKDNQKLSCVISSVGANEIWVRKTSDSTKMRIYLGQLQRGLFVIHRRSAA

SEQ ID NO: 5269 - protein, 35 aa, Homo sapiens
LPRRPPFHIQQRRRGQPLRRFFTRCILVVTRLPRI

SEQ ID NO: 5270 - protein, 19 aa, Homo sapiens
MLSEVNSFRATGCKDLNTI

SEQ ID NO: 5271 - protein, 84 aa, Homo sapiens
KNFLPRLCRMKSFPAWQLFFHKRGLSQDLVATGSATAENVLPCGFLSSCPWPEVPALMAAPHLQLLCSPLPKPYGLPCICIHPV

SEQ ID NO: 5272 - protein, 34 aa, Homo sapiens
MRNLATKPLILSQRFGRNCFLSGSPEYPEESVWN

SEQ ID NO: 5273 - protein, 31 aa, Homo sapiens
ITRIFTCSYPDLGTRMGRPPVAMSPPRCSWG

SEQ ID NO: 5274 - protein, 31 aa, Homo sapiens
LPSARPAAHQPSCRTPRSTRSWMGSFRTSKP

SEQ ID NO: 5275 - protein, 13 aa, Homo sapiens
RNQIYFKRLHMVI

SEQ ID NO: 5276 - protein, 54 aa, Homo sapiens
KNAATNRRRKRQKCVFHLEHPEGAQPYQHLDFDPVTLILDLWPPELLENKFALF

SEQ ID NO: 5277 - protein, 210 aa, Homo sapiens
LETEQVGRNYMKEKKAAVKEFEDKKVELKENLIAELAEEKKMIENEMLTMELNGDSMQVRPIMTRKLRRRPNDPVPIPDKRRKPAPAQLNYLLTDEQIMEDLRTLNKLKSPKRPASPSSPEHLPATPAESPAQRFEARIEDGKLHYDKRWYHKSQAIYLESKDNQKLSCVISSVGANEIWVRKTSDSTKMRIYLGQLQRGLFVIHRRSAA

SEQ ID NO: 5278 - protein, 58 aa, Homo sapiens
RPRHRLTERACGTCAATTTRARPGLTPSRACTAATWGRTGASSAGMTSTPTTARITSP

SEQ ID NO: 5279 - protein, 67 aa, Homo sapiens
KKSRVLAPVGLRVEAGGVWVPSSSDRWMDLSSKRKEETRWQISLKPKIACEAIIRRNKNRHKNRGKE

SEQ ID NO: 5280 - protein, 74 aa, Homo sapiens
LAPTRLLSGHWVSLCWTLSVSGPPRHGWDVLAVCPALFSRPSGAWWGCTPLPGRTPFPWVCTPRRLFIRLPTGT

SEQ ID NO: 5281 - protein, 57 aa, Homo sapiens
KTGKNAATNRRRKRQKCVFHLEHPEGAQPYQHLDFDPVTLILDLWPPELLENKFALF

SEQ ID NO: 5282 - protein, 39 aa, Homo sapiens
MIQRSHASVPAAGAQIFLQGLEDRKLLGYKSKSTAENVY

SEQ ID NO: 5283 - protein, 24 aa, Homo sapiens
IFQDFQVFDAVMLRVHYPRLFIQE

SEQ ID NO: 5284 - protein, 131 aa, Homo sapiens
LLRMSEHRNEALGNYLEMRLKSSFLRGLGSWKSNPLRLGGWTILLTLTMGQGEPGGPQGDPWVPHELLLPSLCDSSHASSWGSGSITCAWRGGDSSSHPLVSGHILSNSPVAAVMCSSMGTHLSPFKGTLL

SEQ ID NO: 5285 - protein, 66 aa, Homo sapiens
ILSCPGPAAGLPPPSPLGLSGWISPPLLLPRRSTEGAAKRAVSANPASLCGGLCHRAMGPEVPGPG

SEQ ID NO: 5286 - protein, 9 aa, Homo sapiens
MFCFACPPI

SEQ ID NO: 5287 - protein, 71 aa, Homo sapiens
MRVPGGGARAAAAGPWGRRCCRSCARGCGPRSPAVGSSTRTRAPSPTASTSMSGSSCSSFPSYCTWSCLPA

SEQ ID NO: 5288 - protein, 62 aa, Homo sapiens [sequence omitted]

SEQ ID NO: 5289 - protein, 13 aa, Homo sapiens
MPSCMFSVCPRGL

SEQ ID NO: 5290 - protein, 117 aa, Homo sapiens
MAEVLRTLAGKPKCHALRPMILFLIMLVLVLFGYGVLSPRSLMPGSLERGFCMAVREPDHLQRVSLPRMVYPQPKVLTPCRKDVLVVPLGWLPLSGRAHSTSTSSTSSSGSRTPPLG

SEQ ID NO: 5291 - protein, 120 aa, Homo sapiens
LGNYLEMRLKSSFLRGLGSWKSNPLRLGGWTILLTLTMGQGEPGGPQGDPWVPHELLLPSLCDSSHASSWGSGSITCAWRGGDSSSHPLVSGHILSNSPVAAVMCSSMGTHLSPFKGTLL

SEQ ID NO: 5292 - protein, 429 aa, Homo sapiens
ICSFIEQQFVQQKGQRFGLGSLAHSIPLGQADPSLARYIIDLPSWTQFRQDTGTMRTVRRHLFPQHSAPGRGVVWEWLSDDGSWTAYEAGVCDDLEQQVARGNQLVDLAPLGYNYTVNYTTHTQTNKTSSFCCSVRRQAGPPYPVTTIIAPPGHTGVACSCHQCLSGSRTGPVSGRYRHSMTNLPAYPAPQHPPHRTASVFGTHQAFAPYNKPSLSGARSAPRLNTTNAWDAAPPSLGSQPLYRSSLSHLGPQHLPPGSSTSGAVSASLPSGPSSSPGSVPATVPMQMPKPSRVQQALAGATPKPEPEPEQVIKNYTEELKVPPDEDCIICMEKLSAASGYSDVTDSKAIGPLAVGCLTKCSHAFHLLCLLAMYCNGNKGPEHPNPGKPFTARGFPRQCYLPDNAQGRKPPGASRTRRHWLTFRPPHSC

SEQ ID NO: 5293 - protein, 103 aa, Homo sapiens
KRRTTDFSDFLSIVGCTKGRHNSEKPPEPVKPEVKTTEEKELSELKPKFQEHIQAPKTVDAIKRPSPDEPMTNLELKISASLKQALDKLKLSSGNEENKKRRQ

SEQ ID NO: 5294 - protein, 41 aa, Homo sapiens
LLSRGLNRLLTLPEVQCIFQDFQVFDAVMLRVHYPRLFIQE

SEQ ID NO: 5295 - protein, 27 aa, Homo sapiens
KKSLECTKLCLPQIENVKGTEDSGEEK

SEQ ID NO: 5296 - protein, 58 aa, Homo sapiens
ICSVSLCTLNIYPLCDKKKKKKKKRIVRRLSIFHSLSLGKMVHGINSWYLYLKLRLVT

SEQ ID NO: 5297 - protein, 9 aa, Homo sapiens
MFSVCPRGL

SEQ ID NO: 5298 - protein, 83 aa, Homo sapiens
VTGGEGRGQRARIRAFRGSRALRAPPYPRGWRAAPEAPARLAVPRLPARASYSTRALNLSVTQALSPESLASWFKRNGRKGAM

SEQ ID NO: 5299 - protein, 66 aa, Homo sapiens
MAKQQEQDPTNLYISNLPLSMDEQELENMLKPFGQVISTRILRDSSGTSRGVGFARFFFFFVRNKT

SEQ ID NO: 5300 - protein, 49 aa, Homo sapiens
LSLTEKNTLLSRGLNRLLTLPEVQCIFQDFQVFDAVMLRVHYPRLFIQE

SEQ ID NO: 5301 - protein, 56 aa, Homo sapiens
LIHRALQLAQRPVSLLASPWTSPTRLKTRGAGNGKGPLKGQPRDIYHQTWARYIVK

SEQ ID NO: 5302 - protein, 11 aa, Homo sapiens
ITKSLFKETVA

SEQ ID NO: 5303 - protein, 393 aa, Homo sapiens
LTFDVIPLLDPYGPAGSDPSLEFLVVSEETYRGGMAINRFRLENVTPEGDWQREWMGDGEGHFEGAVGSTMAPEERSGGSGWWEEARRNWFSVCPLSRRRRSLGRKGRMGGQVGCQGLPLTPSFPLFTLSSLPQDLEELALYQIQLLKDLRHTENEEDKVSSSSFRQRMLGNLLRPPYERPELPTCLYVIGLTGISGSGKSSIAQRLKGLGAFVIDSDHLGHRAYAPGGPAYQPVVEAFGTDILHKDGIINRKVLGSRVFGNKKQLKILTDIMWPIIAKLAREEMDRAVAEGKRVCVIDAAVLLEAGWQNLVHEVWTAVIPETEAVRRIVERDGLSEAAAQSRLQSQMSGQQLVEQSHVVLSTLWEPHITQRQVEKAWALLQKRIPKTHQALD

SEQ ID NO: 5304 - protein, 26 aa, Homo sapiens
LSNSPVAAVMCSSMGTHLSPFKGTLL

SEQ ID NO: 5305 - protein, 109 aa, Homo sapiens
KGWSCCKRRTTDFSDFLSIVGCTKGRHNSEKPPEPVKPEVKTTEEKELSELKPKFQEHIQAPKTVDAIKRPSPDEPMTNLELKISASLKQALDKLKLSSGNEENKKRRQ

SEQ ID NO: 5306 - protein, 245 aa, Homo sapiens
LQQLQEGTLQEYQKRMKKLGQQYKERIRNAELFLQLETEQVGRNYMKEKKAAVKEFEDKKVELKENLIAELAEEKKMIENEMLTMELNGDSMQVRPIMTRKLRRRPNDPVPIPDKRRKPAPAQLNYLLTDEQIMEDLRTLNKLKSPKRPASPSSPEHLPATPAESPAQRFEARIEDGKLHYDKRWYHKSQAIYLESKDNQKLSCVISSVGANEIWVRKTSDSTKMRIYLGQLQRGLFVIHRRSAA

SEQ ID NO: 5307 - protein, 390 aa, Homo sapiens
IDLPSWTQFRQDTGTMRTVRRHLFPQHSAPGRGVVWEWLSDDGSWTAYEAGVCDDLEQQVARGNQLVDLAPLGYNYTVNYTTHTQTNKTSSFCCSVRRQAGPPYPVTTIIAPPGHTGVACSCHQCLSGSRTGPVSGRYRHSMTNLPAYPAPQHPPHRTASVFGTHQAFAPYNKPSLSGARSAPRLNTTNAWDAAPPSLGSQPLYRSSLSHLGPQHLPPGSSTSGAVSASLPSGPSSSPGSVPATVPMQMPKPSRVQQALAGATPKPEPEPEQVIKNYTEELKVPPDEDCIICMEKLSAASGYSDVTDSKAIGPLAVGCLTKCSHAFHLLCLLAMYCNGNKGPEHPNPGKPFTARGFPRQCYLPDNAQGRKPPGASRTRRHWLTFRPPHSC

SEQ ID NO: 5308 - protein, 98 aa, Homo sapiens
MILFLIMLVLVLFGYGVLSPRSLMPGSLERGFCMAVREPDHLQRVSLPRMVYPQPKVLTPCRKDVLVVPLGWLPLSGRAHSTSTSSTSSSGSRTPPLG

SEQ ID NO: 5309 - protein, 425 aa, Homo sapiens
MSCAGVVVCHVPTSSGLGLLGGLSVSAAWRIRLSSSRASDLAPQRREDKPYFDPTLTLFAFFPQPGACQANETIFCELGNPFKRNQRMELLIAFEVIGVTLHTRDLQVQLQLSTSSHQDNLWPMILTLLVDYTLQTSLSMVNHRLQSFFGGTVMGESGMKTVEDVGSPLKYEFQVGPMGEGLVGLGTLVLGLEWPYEVSNGKWLLYPTEITVHGNGSWPCRPPGDLINPLNLTLSDPGDRPSSPQRRRRQLDPGGGQGPPPVTLAAAKKAKSETVLTCATGRAHCVWLECPIPDAPVVTNVTVKARVWNSTFIEDYRDFDRVRVNGWATLFLRTSIPTINMENKTTWFSVDIDSELVEELPAEIELWLVLVAVGAGLLLLGLIILLLWKCGFFKRARTRALYEAKRQKAEMKSQPSETERLTDDY

SEQ ID NO: 5310 - protein, 232 aa, Homo sapiens
KRMKKLGQQYKERIRNAELFLQLETEQVGRNYMKEKKAAVKEFEDKKVELKENLIAELAEEKKMIENEMLTMELNGDSMQVRPIMTRKLRRRPNDPVPIPDKRRKPAPAQLNYLLTDEQIMEDLRTLNKLKSPKRPASPSSPEHLPATPAESPAQRFEARIEDGKLHYDKRWYHKSQAIYLESKDNQKLSCVISSVGANEIWVRKTSDSTKMRIYLGQLQRGLFVIHRRSAA

SEQ ID NO: 5311 - protein, 48 aa, Homo sapiens
MSLSLCAPRIFRAPTPVPRGPRLGAGPPTSAETQSVERSPPSPHPQPL

SEQ ID NO: 5312 - protein, 12 aa, Homo sapiens
MCILVVTRLPRI

SEQ ID NO: 5313 - protein, 59 aa, Homo sapiens
VGGGGVEGRGAQARTNPHVPGRDPDPAAYREAKPAGWAAEPESGTVWSPLELRSGCSAS

SEQ ID NO: 5314 - protein, 46 aa, Homo sapiens
ITCAWRGGDSSSHPLVSGHILSNSPVAAVMCSSMGTHLSPFKGTLL

SEQ ID NO: 5315 - protein, 712 aa, Homo sapiens
TASLRSCCDSPLPFSRVTPVVPRLPRANLCGCRHRRVEFPASGRTELFSRIQCSVSSPQSQSGADREQGTGMAKAAAIGIDLGTTYSCVGVFQHGKVEIIANDQGNRTTPSYVAFTDTERLIGDAAKNQVALNPQNTVFDAKRLIGRKFGDPVVQSDMKHWPFQVINDGDKPKVQVSYKGETKAFYPEEISSMVLTKMKEIAEAYLGYPVTNAVITVPAYFNDSQRQATKDAGVIAGLNVLRIINEPTAAAIAYGLDRTGKGERNVLIFDLGGGTFDVSILTIDDGIFEVKATAGDTHLGGEDFDNRLVNHFVEEFKRKHKKDISQNKRAVRRLRTACERAKRTLSSSTQASLEIDSLFEGIDFYTSITRARFEELCSDLFRSTLEPVEKALRDAKLDKAQIHDLVLVGGSTRIPKVQKLLQDFFNGRDLNKSINPDEAVAYGAAVQAAILMGDKSENVQDLLLLDVAPLSLGLETAGGVMTALIKRNSTIPTKQTQIFTTYSDNQPGVLIQVYEGERAMTKDNNLLGRFELSGIPPAPRGVPQIEVTFDIDANGILNVTATDKSTGKANKITITNDKGRLSKEEIERMVQEAEKYKAEDEVQRERVSAKNALESYAFNMKSAVEDEGLKGKISEADKKKVLDKCQEVISWLDANTLAEKDEFEHKRKELEQVCNPIISGLYQGAGGPGPGGFGAQGPKGGSGSGPTIEEVD

SEQ ID NO: 5316 - protein, 16 aa, Homo sapiens
RALPGTVSSLRSVPPR

SEQ ID NO: 5317 - protein, 120 aa, Homo sapiens
MIGCTQPRRVAAMSVAKRVSEEMGGNLGEEVGYAIRFEDCTSENTLIKYMTDGILLRESLREADLDHYSAIIMDEAHERSLNTDVLFGLLREVRAVWFGLSAHGVLTSAPPVASGLLQVG

SEQ ID NO: 5318 - protein, 45 aa, Homo sapiens
MDPELREGSRMDTQGHRGSNSETRTSRVSREASGISRCGGWRRGG

SEQ ID NO: 5319 - protein, 25 aa, Homo sapiens
ILSQRFGRNCFLSGSPEYPEESVWN

SEQ ID NO: 5320 - protein, 25 aa, Homo sapiens
LIPCFQKIFLTVFASYKIVLSLRKG

SEQ ID NO: 5321 - protein, 74 aa, Homo sapiens
ISGKTESKKSRVLAPVGLRVEAGGVWVPSSSDRWMDLSSKRKEETRWQISLKPKIACEAIIRRNKNRHKNRGKE

SEQ ID NO: 5322 - protein, 26 aa, Homo sapiens
VSWGSFVKFLLMWVNLSLIQLLPYID

SEQ ID NO: 5323 - protein, 245 aa, Homo sapiens
LSRGRGAGGMALVPYEETTEFGLQKFHKPLATFSFANHTIQIRQDWRHLGVAAVVWDAAIVLSTYLEMGAVELRGRSAVELGAGTGLVGIVAALLALKSSMKPLLVHCLLFFSGAHVTITDRKVALEFLKSNVQANLPPHIQTKTVVKELTWGQNLGSFSPGEFDLILGADIIYLEETFTDLLQTLEHLCSNHSVILLACRIRYERDNNFLAMLERQFTVRKVHYDPEKDVHIYEAQKRNQKEDL

SEQ ID NO: 5324 - protein, 72 aa, Homo sapiens
VARSRAGAGPGHGRLGAAVRVVAALLRAEGPGLPAAVAEGLCRCLQEEHLTVLSGATKARGGRCRGPAATTG

SEQ ID NO: 5325 - protein, 63 aa, Homo sapiens
LGLATAPLAHGTSSGAWGPEGPGLPAAVAEGLCRCLQEEHLTVLSGATKARGGRCRGPAATTG

SEQ ID NO: 5326 - protein, 78 aa, Homo sapiens
TATSGWPRGALARLFLRPRGPRSPIIQFRRVTGAAVASQGAGSLSPALLPLAPSPRPRRAGLRGQGPSGEGRDGVSPC

SEQ ID NO: 5327 - protein, 76 aa, Homo sapiens
IIQFRRVTGAAVASQGAGSLSPALLPLAPSPRPRRAGLRGQGPSGEGYHLTWKKMSSLEKKHSNVIVQNSLNIHNR

SEQ ID NO: 5328 - protein, 40 aa, Homo sapiens
LRCSHLPRRPPFHIQQRRRGQPLRRFFTRCILVVTRLPRI

SEQ ID NO: 5329 - protein, 110 aa, Homo sapiens
KTRLLGRMWEKRRVASSRGSSKRDCRAVRDPDKGGPRQQFRRSGGSRAEACGRWREGHEANRRVEMDPELREGSRMDTQGHRGSNSETRTSRVSREASGISRCGGWRRGG

SEQ ID NO: 5330 - protein, 56 aa, Homo sapiens
LPPPSPLGLSGWISPPLLLPRRSTEGAAKRAVSANPASLCGGLCHRAMGPEVPGPG

SEQ ID NO: 5331 - protein, 64 aa, Homo sapiens
LRLPPLPAMYLPCLAVGHVGLPGGRPRGVTFPCHFARRPLPTPTPGCTAQAAAGQRGLWAMDTG

SEQ ID NO: 5332 - protein, 128 aa, Homo sapiens
VRGGGRGGRSAGCRREEALHQGPRRHSFNHIRASAGNACWRLSPVPSILKGKKALPTHSPAPRSWSRRSRAHGVQPVADPVPRAVGEMDVVCGTRRGRRRGRGWRARGRPRGGGFASRDQILEFQLGF

SEQ ID NO: 5333 - protein, 31 aa, Homo sapiens
LRRETAAGRDHPSRSSCPLFPETMRPFAMGA

SEQ ID NO: 5334 - protein, 44 aa, Homo sapiens
LSRSCRRPERSRRRAPTTCSPRWPCSSIPLFFVHHTSHQTRISF

SEQ ID NO: 5335 - protein, 45 aa, Homo sapiens
MGIGVSISLCGVSQGGQWGWGWDAVCAQRGQPGLIWPRGFWMFLG

SEQ ID NO: 5336 - protein, 54 aa, Homo sapiens
ISAPVSMSLSLCAPRIFRAPTPVPRGPRLGAGPPTSAETQSVERSPPSPHPQPL

SEQ ID NO: 5337 - protein, 47 aa, Homo sapiens
LSRRPLPSHRPTQDPGLVTGQCDASRLPRGQRGTHRAWAAPEATRPG

SEQ ID NO: 5338 - protein, 165 aa, Homo sapiens
LGRAGGHTAWLSCSWSPASPRRPGGSISQEARSPPGGWAQPRQMDEKTKKAPENKPCANWLLLYWLSAEEMALSLTRAVAGGDEQVAMKCAIWLAEQRVPLSVQLKPEVSPTQDIRFLMVQNGHSSSIQPSHHRRKGRKTPLHTLLKSIAQKLYTLLPLIPVDQN

SEQ ID NO: 5339 - protein, 48 aa, Homo sapiens
IHLFDTYSWGHEFNSQKRIMMVGGGRMWRGAVQEPRGLVSWTLLIEFL

SEQ ID NO: 5340 - protein, 107 aa, Homo sapiens
KIVLNGVTVDFPFQPYKCQQEYMTKVLECLQQKVNGILESPTGTGKTLCLLCTTLAWREHLRDGISARKIAERAQGELFPDRALSSWGNAAAAAGDPIDSWLSAGPS

SEQ ID NO: 5341 - protein, 22 aa, Homo sapiens
KSGSFKNISYHLLPPHPLQARG

SEQ ID NO: 5342 - protein, 50 aa, Homo sapiens
TFLSFLVKHSLMTMMDIYTYIHIIHNDICVRIYLRLYFVGWAKFSVTITS

SEQ ID NO: 5343 - protein, 68 aa, Homo sapiens
LPFSSGTTLHKCVPRGSPFLSSSTENAARSSYPSSRGPAAMLYAPEGTLVPRKERKKRDGLWLHFLGP

SEQ ID NO: 5344 - protein, 76 aa, Homo sapiens
RRRQVARSRAGAGPGHGRLGAAVRVVAALLRAEGPGLPAAVAEGLCRCLQEEHLTVLSGATKARGGRCRGPAATTG

SEQ ID NO: 5345 - protein, 56 aa, Homo sapiens
LCVFASVCLTDGPHTRFPVTGRDPGKRGLEGGRGAAIQLPARIFGPALSSSPGVGS

SEQ ID NO: 5346 - protein, 50 aa, Homo sapiens
LGLSGWISPPLLLPRRSTEGAAKRAVSANPASLCGGLCHRAMGPEVPGPG

SEQ ID NO: 5347 - protein, 42 aa, Homo sapiens
VRELRGPGIVFKVVLLPTCPVVPAPVLTATLPFFHPRVGSTK

SEQ ID NO: 5348 - protein, 47 aa, Homo sapiens
RARAPPGALPRRCPPRDPLPTSHHVGPRGQRAAGWDHFGLRSLEKIF

SEQ ID NO: 5349 - protein, 200 aa, Homo sapiens [sequence omitted]

SEQ ID NO: 5350 - protein, 26 aa, Homo sapiens
MVFLREKITEETSALMALQSWQYYNP

SEQ ID NO: 5351 - protein, 125 aa, Homo sapiens
MEPDFLHSVGVKLPHTPPNTCPRASPSHPPSQGRRDPVPVEVGKPSRVQKAEAMAQSGGAAFWGSALGLQTQGAEMLAAGPPTRARQPALPGELRGAEVPGEAAPGARALPDLGNRQSGAPGSKS

SEQ ID NO: 5352 - protein, 75 aa, Homo sapiens [sequence omitted]

SEQ ID NO: 5353 - protein, 30 aa, Homo sapiens
KTSTYCMLTRRKDNIFRKSTAHCCLYTLYI

SEQ ID NO: 5354 - protein, 147 aa, Homo sapiens
ITRWEQPERSRASAPMLLRMSEHRNEALGNYLEMRLKSSFLRGLGSWKSNPLRLGGWTILLTLTMGQGEPGGPQGDPWVPHELLLPSLCDSSHASSWGSGSITCAWRGGDSSSHPLVSGHILSNSPVAAVMCSSMGTHLSPFKGTLL

SEQ ID NO: 5355 - protein, 17 aa, Homo sapiens
RRPTRRRLCCSHVSSDP

SEQ ID NO: 5356 - protein, 26 aa, Homo sapiens
LGAGPPTSAETQSVERSPPSPHPQPL

SEQ ID NO: 5357 - protein, 42 aa, Homo sapiens
LPSHRPTQDPGLVTGQCDASRLPRGQRGTHRAWAAPEATRPG

SEQ ID NO: 5358 - protein, 38 aa, Homo sapiens
LFTSAVSSFSCKKSLECTKLCLPQIENVKGTEDSGEEK

SEQ ID NO: 5359 - protein, 31 aa, Homo sapiens
RIMMVGGGRMWRGAVQEPRGLVSWTLLIEFL

SEQ ID NO: 5360 - protein, 74 aa, Homo sapiens [sequence omitted]

SEQ ID NO: 5361 - protein, 161 aa, Homo sapiens
LEKAPDQRTQPAGRRAALRPAWAPGTAAGAASYLVKFVLPSAWTQAPVAAREGTGLARLLARPPLPARSPPAASLARPLRSSGSHYSSFQYGILSVRMLGALFFFFFFFFLRFCVCVYVCACACSELLQRPFPALAKFLKPISLRDVIGSFPSQLRAIPCA

SEQ ID NO: 5362 - protein, 148 aa, Homo sapiens
LACSLCVPALLCFSAPSVLCAGDTWAFPVPCSHLWSVGRQWRRERWEPGSAGLKVATAKRSAPPATPTRRMRIASAARVVAPQQTQSRRDTAAAPLRRDTAAAPLRPFELFPPYFSVSCYTAILLFICYFRQYPPALYHGHSVRIWFS

SEQ ID NO: 5363 - protein, 72 aa, Homo sapiens
LLLLLAAAIFVIIIFYVRCCKKKTSAAEGPELVSLQVLDQHPVGTSDHRDATQLGFQPLMSALGSTGSTEGT

SEQ ID NO: 5364 - protein, 65 aa, Homo sapiens
MVECVASRDRTTGGMFCASTVTLFPAWGLWERWRETGTEMVRQGESHKEEDREKEDKCIKRFRDV

SEQ ID NO: 5365 - protein, 161 aa, Homo sapiens
MSSHLPFYVTCARWLLCLQTSHLHSRQKGEGKSKRCVPNKSILKTNKGRGSRRKFKKKKKKNKNRKAVVSLKAPSSRLLPVTHYPVMWPPLDSRQSEEVSVSKRHMDATDKIKFPWLKEKRTIEFGEAAGYVCHRRYKDMEPHEKMGEAAKKVHWVQVRSR

SEQ ID NO: 5366 - protein, 55 aa, Homo sapiens
MVFPAKPEAPSLLPLFSLVSFSGWPEDETPQTPHFLALVPGLAGPGIHLHCVGCP

SEQ ID NO: 5367 - protein, 91 aa, Homo sapiens
LCPLGKCWCFRVIGRHSMFLLLLLAAAIFVIIIFYVRCCKKKTSAAEGPELVSLQVLDQHPVGTSDHRDATQLGFQPLMSALGSTGSTEGT

SEQ ID NO: 5368 - protein, 64 aa, Homo sapiens
IFVIIIFYVRCCKKKTSAAEGPELVSLQVLDQHPVGTSDHRDATQLGFQPLMSALGSTGSTEGT

SEQ ID NO: 5369 - protein, 1795 aa, Homo sapiens
MFSPLKSRARALAHGDPFQVSRAQDFQVGVTVLEAQKLVGVNINPYVAVQVGGQRRVTATQRGTSCPFYNEYFLFEFHDTRLRLQDLLLEITAFHSQTLPFMATRIGTFRMDLGIILDQPDGQFYQRWVPLHDPRDTRAGTKGFIKVTLSVRARGDLPPPMLPPAPGHCSDIEKNLLLPRGVPAERPWARLRVRLYRAEGLPALRLGLLGSLVRALHDQRVLVEPYVRVSFLGQEGETSVSAEAAAPEWNEQLSFVELFPPLTRSLRLQLRDDAPLVDAALATHVPDLRRISHPGRAAGFNPTFGPAWVPLYGSPPGAGLRDSLQGLNEGVGQGIWFRGRLLLAVSMQVLEGRAEPEPPQAQQGSTLSRLTRKKKKKARRDQTPKAVPQHLDASPGAEGPEIPRAMEVEVEELLPLPENVLAPCEDFLLFGVLFEATMIDPTVASQPISFEISIGRAGRLEEQLGRGSRAGEGTEGAAVEAQPLLGARPEEEKEEEELGTHAQRPEPMDGSGPYFCLPLCHCKPCMHVWSCWEDHTWRLQSSNCVRKVAERLDQGLQEVERLQRKPGPGACAQLKQALEVLVAGSRQFCHGAERRTMTRPNALDRCRGKLLVHSLNLLAKQGLRLLRGLRRRNVQKKVALAKKLLAKLRFLAEEPQPPLPDVLVWMLSGQRRVAWARIPAQDVLFSVVEEERGRDCGKIQSLMLTAPGAAPGEVCAKLELFLRLGLGKQAKACTSELPPDLLPEPSAGLPSSLHRDDFSYFQLRAHLYQARGVLAADDSGLSDPFARVLISTQCQTTRVLEQTLSPLWDELLVFEQLIVDGRREHLQEEPPLVIINVFDHNKFGPPVFLGRALAAPRVKLMEDPYQRPELQFFPLRKGPWAAGELIAAFQLIELDYSGRLEPSVPSEVEPQDLAPLVEPHSGRLSLPPNVCPVLREFRVEVLFWGLRGLGRVHLLEVEQPQVVLEVAGQGVESEVLASYRESPNFTELVRHLTVDLPEQPYLQPPLSILVIERRAFGHTVLVGSHIVPHMLRFTFRGHEDPPEEEGEMEETGDMMPKGPQGQKSLDPFLAEAGISRQLLKPPLKKLPLGGLLNQGPGLEEDIPDPEELDWGSKYYASLQELQGQHNFDEDEMDDPGDSDGVNLISMVGEIQDQGEAEVKGTVSPKKAVATLKIYNRSLKEEFNHFEDWLNVFPLYRGQGGQDGGGEEEGSGHLVGKFKGSFLIYPESEAVLFSEPQISRGIPQNRPIKLLVRVYVVKATNLAPADPNGKADPYVVVSAGRERQDTKERYIPKQLNPIFGEILELSISLPAETELTVAVFDHDLVGSDDLIGETHIDLENRFYSHHRANCGLASQYEVDGYNAWRDAFWPSQILAGLCQRCGLPAPEYRAGAVKVGSKVFLTPPETLPPGSSSPTVASGDPEEAQALLVLRRWQEMPGFGIQLVPEHVETRPLYHPHSPGLLQGSLHMWIDIFPQDVPAPPPVDIKPRQPISYELRVVIWNTEDVVLDDENPLTGEMSSDIYVKSWVKGLEHDKQETDVHFNSLTGEGNFNWRFVFRFDYLPTEREVSVRRRSGPFALEEAEFRQPAVLVLQVWDYDRISANDFLGSLELQLPDMVRGARGPELCSVQLARNGAGPRCNLFRCCRRLRGWWPVVKLKEAEDVEREAQEAQAGKKKRKQRRRKGRPEDLEFTDMGGNVYILTGKVEAEFELLTVEEAEKRPVGKGRKQPEPLEKPSRPKTSFNWFVNPLKTFVFFIWRRYWRTLVLLLLVLLTVFLLLVFYTIPGQISQVIFRPLHK

SEQ ID NO: 5370 - protein, 35 aa, Homo sapiens
MQQTGMAGSSFTCYPALVLASLGLWWPLHQTSLCL

SEQ ID NO: 5371 - protein, 61 aa, Homo sapiens
MKRIRTLTFLAVHFPPVKVMVQFSIHIHIRGLACCTSKKPDCCSLLRTGMQQSGRGCLILS

SEQ ID NO: 5372 - protein, 13 aa, Homo sapiens
LRRGALFCSVLFF

SEQ ID NO: 5373 - protein, 88 aa, Homo sapiens
LGKCWCFRVIGRHSMFLLLLLAAAIFVIIIFYVRCCKKKTSAAEGPELVSLQVLDQHPVGTSDHRDATQLGFQPLMSALGSTGSTEGT

SEQ ID NO: 5374 - protein, 129 aa, Homo sapiens
RMSEHRNEALGNYLEMRLKSSFLRGLGSWKSNPLRLGGWTILLTLTMGQGEPGGPQGDPWVPHELLLPSLCDSSHASSWGSGSITCAWRGGDSSSHPLVSGHILSNSPVAAVMCSSMGTHLSPFKGTLL

SEQ ID NO: 5375 - protein, 32 aa, Homo sapiens
LQSWKREGLKGPLYIFCLSLSLCVLIIICVLI

SEQ ID NO: 5376 - protein, 9 aa, Homo sapiens
LTLAVLVFC

SEQ ID NO: 5377 - protein, 124 aa, Homo sapiens
MEPTRPGWPPGFAEERSRGSPATWNTAGITALTLCPLGKCWCFRVIGRHSMFLLLLLAAAIFVIIIFYVRCCKKKTSAAEGPELVSLQVLDQHPVGTSDHRDATQLGFQPLMSALGSTGSTEGT

SEQ ID NO: 5378 - protein, 147 aa, Homo sapiens
VGVSSPLSLLPSLARTLAVSSLCRDCQSVRLQRGGDGRLCHGFMRAGTGRRTCRRRGEETWSRPLALWGRVGQSVGEAGGGDRTGWGWTPGFWERAGSPDARVPKVSGVAISPDPPRGRSAGQRGGGWGEAWPERCWKRSRDLWGPR

SEQ ID NO: 5379 - protein, 94 aa, Homo sapiens
MRAPRPPAPAPGAPGFGSILPAPVPAAARSRGQRPSGGWKRRGENTPSAVTTLTPLTVMRHLHPHQDAPNCPAAPSRAGPDRTKRSPPRFSGQT

SEQ ID NO: 5380 - protein, 137 aa, Homo sapiens
MNRRLGSRPSPPLPRPSPFAPPAPSSPLSFLLGLCWGLEGSGLRSEPACGGGARPSRHPQRPAILGSAAAAGVWARSLRAPRRPLAPDSFFFFFGGIFFFPRGGLAASNKLGEREGENAKSRFLSTSAPPTPVLSKK

SEQ ID NO: 5381 - protein, 90 aa, Homo sapiens
MSLEAPPPWGSQSPLPSLLSLGTLLPFPPALILLSDMAQAFLPGPCLARLAEGTLLLCTLGTRAGLALPMPPSHPHGALASSKHPPWWMD

SEQ ID NO: 5382 - protein, 90 aa, Homo sapiens
GVSIRPLSLGRCWGRWQLQTRGLALLTAVCSTGVPRGTCSQQVAQAVTQLRRCEWRGHRGGQGRGRRGARGSSAGDNLRAFVDNCLYAKH

SEQ ID NO: 5383 - protein, 55 aa, Homo sapiens
LQILPGARQALRPGALAVGDPPRIPPLLRAPRGLWRLGLLSGLSWLVYALCLISG

SEQ ID NO: 5384 - protein, 128 aa, Homo sapiens
VNICGCPLLFFLLFQLLLLLPLPSRSRKPPTQLTLAQLQTVSSAQLYLAPRAPLRHWTHRRVFYFLQSCIAVHIFVPATSLCLWSALQPRKLLLELRPSAPAGQWRSPPSSRAQPLLLWADDAEDALL

SEQ ID NO: 5385 - protein, 72 aa, Homo sapiens
IGLSSALPVLHLGSALVLLGSKLLAFTFDPKHLKPWATHGGREHHHPSVHTSISFSSWCWLVFLTSVQVLST

SEQ ID NO: 5386 - protein, 924 aa, Homo sapiens
MDRQCSERPYSCTPTGRVSSAVSQNSRISPPVSTSMKDSSCMKVHQDSARRDRWSHPTTILLHKSQSSQATLMLQEHRMFMGEAYSAATGFKMLQDMNSADPFHLKYIIKKIKNMAHGSPKLVMETIHDYFIDNPEISSRHKFRLFQTLEMVIGASDVLEETWEKTFTRLALENMTKATELEDIYQDAASNMLVAICRHSWRVVAQHLETELLTGVFPHRSLLYVMGVLSSSEELFSQEDKACWEEQLIQMAIKSVPFLSTDVWSKELLWTLTTPSWTQQEQSPEKAFLFTYYGLILQAEKNGATVRRHLQALLETSHQWPKQREGMALTLGLAATRHLDDVWAVLDQFGRSRPIRWSLPSSSPKNSEDLRWKWASSTILLAYGQVAAKARAHILPWVDNIVSRMVFYFHYSSWDETLKQSFLTATLMLMGAVSRSEGAHSYEFFQTSELLQCLMVLMEKEPQDTLCTRSRQQAMHIASSLCKLRPPIDLERKSQLLSTCFRSVFALPLLDALEKHTCLFLEPPNIQLWPVARERAGWTHQGWGPRAVLHCSEHLQSLYSRTMEALDFMLQSLIMQNPTADELHFLLSHLYIWLASEKAHERQRAVHSCMILLKFLNHNGYLDPKEDFKRIGQLVGILGMLCQDPDRATQRCSLEGASHLYQLLMCHKTGEALQAESQAPKELSQAHSDGAPLWNSRDQKATPLGPQEMAKNHIFQLCSFQVIKDIMQQLTLAELSDLIWTAIDGLGSTSPFRVQAASEMLLTAVQEHGAKLEIVSSMAQAIRLRLCSVHIPQAKEKTLHAITLLARSHTCELVATFLNISIPLDSHTFQLWRALGAGQPTSHLVLTTLLACLQERPLPTGASDSSPCPKEKTYLRLLAAMNMLHELQFAREFKQAVQEGYPKLFLALLTQMHYVLELNLPSEP

SEQ ID NO: 5387 - protein, 356 aa, Homo sapiens
MLPPWTLGLLLLATVRGKEVCYGQLGCFSDEKPWAGTLQRPVKLLPWSPEDIDTRFLLYTNENPNNFQLITGTEPDTIEASNFQLDRKTRFIIHGFLDKAEDSWPSDMCKKMFEVEKVNCICVDWRHGSRAMYTQAVQNIRVVGAETAFLIQALSTQLGYSLEDVHVIGHSLGAHTAAEAGRRLGGRVGRITGLDPAGPCFQDEPEEVRLDPSDAVFVDVIHTDSSPIVPSLGFGMSQKVGHLDFFPNGGKEMPGCKKNVLSTITDIDGIWEGIGGFVSCNHLRSFEYYSSSVLNPDGFLGYPCASYDEFQESKCFPCPAEGCPKMGHYADQFKGKTSAVEQTFFLNTGESGNFTS

SEQ ID NO: 5388 - protein, 51 aa, Homo sapiens
MRPSVWAAVAAGLWVLCTVIAEGPPALPALALPLAGAPDAGGCQGAEGPLP

SEQ ID NO: 5389 - protein, 75 aa, Homo sapiens
MRPSVWAAVAAGLWVLCTVIAEGPPALPALALPLAGAPDAGGCQGAEGPLRGRGAELGAAQLLLPPQEGSSAAIA

SEQ ID NO: 5390 - protein, 123 aa, Homo sapiens
MRPSVWAAVAAGLWVLCTVIAEGPPALPALALPLAGAPDAGGCQGAEGPLRGRGAELGAAQLLLPPQEGSSAAIVLRSAPPRGPGHRGRPGSAQRPAPLGAAPRRRPDPGAAGGRGEGCGGLP

SEQ ID NO: 5391 - protein, 144 aa, Homo sapiens
LLLLIIWVRVTFMSCSTHREGLQLRYSLLKPARPRTHREEETTPDAPPLRAVTLTVKVCGITPEVRETTNPPEETPDASEHLKEQTLDTPSLRTETPRQFAASFLKAVRPRTHQFWTQKDLSRLRKWQAIYEEGRDSKRWSQVL

SEQ ID NO: 5392 - protein, 69 aa, Homo sapiens [sequence omitted]

SEQ ID NO: 5393 - protein, 71 aa, Homo sapiens
LTDTGATTDTLQGWFSPVQGRCAHCRTCSILRPTPLTKGQRTPGPIVLLVMDLLTLCSKFSFFSWLFFERG

SEQ ID NO: 5394 - protein, 1403 aa, Homo sapiens
VVPRSWPRAGGRRRRLPACYGMDEEENHYVSQLREVYSSCDTTGTGFLDRQELTQLCLKLHLEQQLPVLLQTLLGNDHFARVNFEEFKEGFVAVLSSNAGVRPSDEDSSSLESAASSAIPPKYVNGSKWYGRRSRPELCDAATEARRVPEQQTQASLKSHLWRSASLESVESPKSDEEAESTKEAQNELFEAQGQLQTWDSEDFGSPQKSCSPSFDTPESQIRGVWEELGVGSSGHLSEQELAVVCQSVGLQGLEKEELEDLFNKLDQDGDGKVSLEEFQLGLFSHEPALLLESSTRVKPSKAWSHYQVPEESGCHTTTTSSLVSLCSSLRLFSSIDDGSGFAFPDQVLAMWTQEGIQNGREILQSLDFSVDEKVNLLELTWALDNELMTVDSAVQQAALACYHQELSYQQGQVEQLARERDKARQDLERAEKRNLEFVKEMDDCHSTLEQLTEKKIKHLEQGYRERLSLLRSEVEAERELFWEQAHRQRAALEWDVGRLQAEEAGLREKLTLALKENSRLQKEIVEVVEKLSDSERLALKLQKDLEFVLKDKLEPQSAELLAQEERFAAVLKEYELKCRDLQDRNDELQAELEGLWARLPKNRHSPSWSPDGRRRQLPGLGPAGISFLGNSAPVSIETELMMEQVKEHYQDLRTQLETKVNYYEREIAALKRNFEKERKDMEQARRREVSVLEGQKADLEELHEKSQEVIWGLQEQLQDTARGPEPEQMGLAPCCTQALCGLALRHHSHLQQIRREAEAELSGELSGLGALPARRDLTLELEEPPQGPLPRGSQRSEQLELERALKLQPCASEKRAQMCVSLALEEEELELARGKRVDGPSLEAEMQALPKDGLVAGSGQEGTRGLLPLRPGCGERPLAWLAPGDGRESEEAAGAGPRRRQAQDTEATQSPAPAPAPASHGPSERWSRMQPCGVDGDIVPKEPEPFGASAAGLEQPGARELPLLGTERDASQTQPRMWEPPLRPAASCRGQAERLQAIQEERARSWSRGTQEQASEQQARAEGALEPGCHKHSVEVARRGSLPSHLQLADPQGSWQEQLAAPEEGETKIALEREKDDMETKLLHLEDVVRALEKHVDLRENDRLEFHRLSEENTLLKNDLGRVRQELEAAESTHDAQRKEIEVLKKDKEKACSEMEVLNRQNQNYKDQLSQLNVRVLQLGQEASTHQAQNEEHRVTIQMLTQSLEEVVRSGQQQSDQIQKLRVELECLNQEHQSLQLPWSELTQTLEESQDQVQGAHLRLRQAQAQHLQEVRLVPQDRVAELHRLLSLQGEQARRRLDAQREEHEKQLKATEERVEEAEMILKNMEMLLQEKVDKLKEQFEKNTKSDLLLKELYVENAHLVRALQATEEKQRGAEKQSRLLEEKVRALNKLVSRIAPAALSV

SEQ ID NO: 5395 - protein, 96 aa, Homo sapiens
VPGRGGDRRKVLLRILSRAEKNSRGYMWAAFPPSSFFPSQTNNQKVFGDGKNTSGKRQITVFPTPSQVLFALLFPVSLQFIDFIVVFCLFGARTEM

SEQ ID NO: 5396 - protein, 104 aa, Homo sapiens
LSPFLFLAIGRLTEIQQPRLQPACHLQSIICGYIEHCADRLSFNVMIYRPMKRNRNPLLMLISLRRLLVSSTWHAASFSLTTTKTILIFLASALCRNLKDKKMQ

SEQ ID NO: 5397 - protein, 38 aa, Homo sapiens
MCLGLLFCFMPLSLVVSSEEARFKVAADLCGFATGNSW

SEQ ID NO: 5398 - protein, 62 aa, Homo sapiens
MTWTKCPLPLGPAFFTQCCLIGLLVPLLGWGNQNTQWYPTSKMPDLKDSKTTDLCQHVKHMV

SEQ ID NO: 5399 - protein, 18 aa, Homo sapiens
MPEIWPLGQGMPAARDSS

SEQ ID NO: 5400 - protein, 89 aa, Homo sapiens
MLALFHFHLPPWDDAVRRPSVDASPSTLNFPDAELYASIFLCCMAPGEILISFLTLVQIAHANGRGCNTPACGAAACVWHENSQEERKY

SEQ ID NO: 5401 - protein, 49 aa, Homo sapiens
MSRLSLSWESLTNAIWPLDLQDIKGYLPNPLPQRVNLRKQILSISKEPN

SEQ ID NO: 5402 - protein, 18 aa, Homo sapiens
MLYLKNTSKFSAQEIGLM

SEQ ID NO: 5403 - protein, 46 aa, Homo sapiens
METFEIFYLKCIRVNLISRQLNTFFLAVLLVVCMPCFHSVCTGKRT

SEQ ID NO: 5404 - protein, 18 aa, Homo sapiens
MPEIWPLGQGMPAARDSS
